(19) United States
(12) Patent Application Publication
(10) Pub. No.: US 2004/0096451 A1
(43) Pub. Date: May 20, 2004

(54) Methods of treating and preventing RSV, hMPV, and PIV using anti-RSV, anti-hMPV, and anti-PIV antibodies

(76) Inventors: James F. Young, Potomac, MD (US); Peter Kiener, Potomac, MD (US); Albertus Dominicus Marcellinus Erasmus Osterhaus, Bunnik (NL); Ronaldus Adrianus Maria Fouchier, Rotterdam (NL)

Correspondence Address: JONES DAY, 222 EAST 41ST STREET, NEW YORK, NY, 10017, US

(21) Appl. No.: 10/628,088

(22) Filed: Jul. 25, 2003

Related U.S. Application Data
(60) Provisional application No. 60/398,475, filed on Jul. 25, 2002.

(51) Int. Cl. A61K 39/42

(52) U.S. Cl. 424/147.1; 424/159.1

(57) ABSTRACT

The present invention relates to methods for broad spectrum prevention and treatment of viral respiratory infection. In particular, the present invention relates to methods for preventing, treating or ameliorating symptoms associated with respiratory syncytial virus (RSV), parainfluenza virus (PIV), and/or human metapneumovirus (hMPV) infection, the methods comprising administering to a subject an effective amount of one or more anti-RSV-antigen antibodies or antigen-binding fragments thereof, one or more anti-hMPV-antigen antibodies or antigen-binding fragments thereof, and/or one or more anti-PIV-antigen antibodies or antigen-binding fragments thereof. In certain embodiments, a certain serum titer of the anti-RSV-antigen antibodies, anti-PIV-antigen antibodies, and/or anti-hMPV-antigen antibodies or antigen-binding fragments thereof is achieved in said subject. In certain specific embodiments, the subject is human and, preferably, the anti-RSV-antigen antibody, anti-PIV-antigen antibody, and/or anti-hMPV-antigen antibodies are human or humanized. The present invention relates further to compositions comprising the anti-RSV-antigen antibodies, anti-PIV-antigen antibodies, and/or anti-hMPV-antigen antibodies or antigen-binding fragments thereof. The present invention also relates to detectable or diagnostic compositions comprising the one or more anti-RSV-antigen antibodies, anti-PIV-antigen antibodies, and/or anti-hMPV-antigen antibodies or antigen-binding fragments thereof and methods for detecting or diagnosing RSV, PIV and/or hMPV infection utilizing the compositions.

### RELATED APPLICATIONS

[0001] This application claims benefit of U.S. provisional application No. 60/398,475, filed Jul. 25, 2002, which is incorporated herein by reference in its entirety.

### 1. INTRODUCTION

[0002] The present invention provides methods for broad spectrum prevention and treatment of viral respiratory infection. In particular, the present invention relates to methods for preventing, treating or ameliorating symptoms associated with respiratory syncytial virus (RSV), parainfluenza virus (PIV), and/or human metapneumovirus (hMPV) infection, the methods comprising administering to a subject an effective amount of one or more anti-RSV-antigen antibodies or antigen-binding fragments thereof, one or more anti-hMPV-antigen antibodies or antigen-binding fragments thereof, and/or one or more anti-PIV-antigen antibodies or antigen-binding fragments thereof. In certain embodiments, a certain serum titer of the anti-RSV-antigen antibodies, anti-PIV-antigen antibodies, and/or anti-hMPV-antigen antibodies or antigen-binding fragments thereof is achieved in said subject. In certain specific embodiments, the subject is human and, preferably, the anti-RSV-antigen antibody, anti-PIV-antigen antibody, and/or anti-hMPV-antigen antibodies are human or humanized. The present invention relates further to compositions comprising the anti-RSV-antigen antibodies, anti-PIV-antigen antibodies, and/or anti-hMPV-antigen antibodies or antigen-binding fragments thereof. The present invention also relates to detectable or diagnostic compositions comprising the one or more anti-RSV-antigen antibodies, anti-PIV-antigen antibodies, and/or anti-hMPV-antigen antibodies or antigen-binding fragments thereof and methods for detecting or diagnosing RSV, PIV and/or hMPV infection utilizing the compositions.

### 2. BACKGROUND OF THE INVENTION

[0003] 2.1. PIV Infections

[0004] Parainfluenza viral infection results in serious respiratory tract disease in infants and children. (Tao, et al., 1999, Vaccine 17: 1100-08). Infectious parainfluenza viral infections account for approximately 20% of all hospitalizations of pediatric patients suffering from respiratory tract infections worldwide. Id.

[0005] PIV is a member of the paramyxovirus genus of the paramyxovirus family. PIV is made up of two structural modules: (1) an internal ribonucleoprotein core, or nucleocapsid, containing the viral genome, and (2) an outer, roughly spherical lipoprotein envelope. Its genome is a single strand of negative sense RNA, approximately 15,456 nucleotides in length, encoding at least eight polypeptides. These proteins include, but are not limited to, the nucleocapsid structural protein (NP, NC, or N depending on the genera), the phospoprotein (P), the matrix protein (M), the fusion glycoprotein (F), the hemagglutinin-neuraminidase glycoprotein (HN), the large polymerase protein (L), and the C and D proteins of unknown function. Id.

[0006] The parainfluenza nucleocapsid protein (NP, NC, or N) consists of two domains within each protein unit including an amino-terminal domain, comprising about two-thirds of the molecule, which interacts directly with the RNA, and a carboxyl-terminal domain, which lies on the surface of the assembled nucleocapsid. A hinge is thought to exist at the junction of these two domains thereby imparting some flexibility to this protein (see Fields et al. (ed.), 1991, Fundamental Virology, Second Edition, Raven Press, New York, incorporated by reference herein in its entirety). The matrix protein (M), is apparently involved with viral assembly and interacts with both the viral membrane as well as the nucleocapsid proteins. The phosphoprotein (P), which is subject to phosphorylation, is thought to play a regulatory role in transcription, and may also be involved in methylation, phosphorylation and polyadenylation. The fusion glycoprotein (F) interacts with the viral membrane and is first produced as an inactive precursor, then cleaved post-translationally to produce two disulfide linked polypeptides. The active F protein is also involved in penetration of the parainfluenza virion into host cells by facilitating fusion of the viral envelope with the host cell plasma membrane. Id. The glycoprotein, hemagglutinin-neuraminidase (HN), protrudes from the envelope allowing the virus to contain both hemagglutinin and neuraminidase activities. HN is strongly hydrophobic at its amino terminal which functions to anchor the HN protein into the lipid bilayer. Id. Finally, the large polymerase protein (L) plays an important role in both transcription and replication. Id.

[0007] 2.2 RSV Infections

[0008] Respiratory syncytial virus (RSV) is the leading cause of serious lower respiratory tract disease in infants and children (Feigen et al., eds., 1987, In: Textbook of Pediatric Infectious Diseases, W B Saunders, Philadelphia at pages 1653-1675; New Vaccine Development, Establishing Priorities, Vol. 1, 1985, National Academy Press, Washington D.C. at pages 397-409; and Ruuskanen et al., 1993, Curr. Probl. Pediatr. 23:50-79). The yearly epidemic nature of RSV infection is evident worldwide, but the incidence and severity of RSV disease in a given season vary by region (Hall, C. B., 1993, Contemp. Pediatr. 10:92-110). In temperate regions of the northern hemisphere, it usually begins in late fall and ends in late spring. Primary RSV infection occurs most often in children from 6 weeks to 2 years of age and uncommonly in the first 4 weeks of life during nosocomial epidemics (Hall et al., 1979, New Engl. J. Med. 300:393-396). Children at increased risk from RSV infection include, but are not limited to, preterm infants (Hall et al., 1979, New Engl. J. Med. 300:393-396) and children with bronchopulmonary dysplasia (Groothuis et al., 1988, Pediatrics 82:199-203), congenital heart disease (MacDonald et al., New Engl. J. Med. 307:397-400), congenital or acquired immunodeficiency (Ogra et al., 1988, Pediatr. Infect. Dis. J. 7:246-249; and Pohl et al., 1992, J. Infect. Dis. 165:166-169), and cystic fibrosis (Abman et al., 1988, J. Pediatr. 113:826-830). The fatality rate in infants with heart or lung disease who are hospitalized with RSV infection is 3%-4% (Navas et al., 1992, J. Pediatr. 121:348-354).

[0009] RSV infects adults as well as infants and children. In healthy adults, RSV causes predominantly upper respiratory tract disease. It has recently become evident that some adults, especially the elderly, have symptomatic RSV infections more frequently than had been previously reported (Evans, A. S., eds., 1989, Viral Infections of Humans. Epidemiology and Control, 3^{rd} ed., Plenum Medical Book, New York at pages 525-544). Several epidemics also have been reported among nursing home patients and institutionalized young adults (Falsey, A. R., 1991, Infect. Control Hosp. Epidemiol. 12:602608; and Garvie et al., 1980, Br. Med. J. 281:1253-1254). Finally, RSV may cause serious disease in immunosuppressed persons, particularly bone marrow transplant patients (Hertz et al., 1989, Medicine 68:269281).

[0010] Treatment options for established RSV disease are limited. Severe RSV disease of the lower respiratory tract often requires considerable supportive care, including administration of humidified oxygen and respiratory assistance (Fields et al., eds, 1990, Fields Virology, 2^{nd} ed., Vol. 1, Raven Press, New York at pages 1045-1072).

[0011] While a vaccine might prevent RSV infection, no vaccine is yet licensed for this indication. A major obstacle to vaccine development is safety. A formalin-inactivated vaccine, though immunogenic, unexpectedly caused a higher and more severe incidence of lower respiratory tract disease due to RSV in immunized infants than in infants immunized with a similarly prepared trivalent parainfluenza vaccine (Kim et al., 1969, Am. J. Epidemiol. 89:422-434; and Kapikian et al., 1969, Am. J. Epidemiol. 89:405-421). Several candidate RSV vaccines have been abandoned and others are under development (Murphy et al., 1994, Virus Res. 32:13-36), but even if safety issues are resolved, vaccine efficacy must also be improved. A number of problems remain to be solved. Immunization would be required in the immediate neonatal period since the peak incidence of lower respiratory tract disease occurs at 2-5 months of age. The immaturity of the neonatal immune response together with high titers of maternally acquired RSV antibody may be expected to reduce vaccine immunogenicity in the neonatal period (Murphy et al., 1988, J. Virol. 62:3907-3910; and Murphy et al., 1991, Vaccine 9:185-189). Finally, primary RSV infection and disease do not protect well against subsequent RSV disease (Henderson et al., 1979, New Engl. J. Med. 300:530-534).

[0012] Currently, the only approved approach to prophylaxis of RSV disease is passive immunization. Initial evidence suggesting a protective role for IgG was obtained from observations involving maternal antibody in ferrets (Prince, G. A., Ph.D. diss., University of California, Los Angeles, 1975) and humans (Lambrecht et al, 1976, J. Infect. Dis. 134:211-217; and Glezen et al., 1981, J. Pediatr. 98:708-715). Hemming et al. (Morell et al., eds., 1986, Clinical Use of Intravenous Immunoglobulins, Academic Press, London at pages 285-294) recognized the possible utility of RSV antibody in treatment or prevention of RSV infection during studies involving the pharmacokinetics of an intravenous immune globulin (IVIG) in newborns suspected of having neonatal sepsis. They noted that 1 infant, whose respiratory secretions yielded RSV, recovered rapidly after IVIG infusion. Subsequent analysis of the IVIG lot revealed an unusually high titer of RSV neutralizing antibody. This same group of investigators then examined the ability of hyperimmune serum or immune globulin, enriched for RSV neutralizing antibody, to protect cotton rats and primates against RSV infection (Prince et al., 1985, Virus Res. 3:193-206; Prince et al., 1990, J. Virol. 64:3091-3092; Hemming et al., 1985, J. Infect. Dis. 152:1083-1087; Prince et al., 1983, Infect. Immun. 42:81-87; and Prince et al., 1985, J. Virol. 55:517-520). Results of these studies suggested that RSV neutralizing antibody given prophylactically inhibited respiratory tract replication of RSV in cotton rats. When given therapeutically, RSV antibody reduced pulmonary viral replication both in cotton rats and in a nonhuman primate model. Furthermore, passive infusion of immune serum or immune globulin did not produce enhanced pulmonary pathology in cotton rats subsequently challenged with RSV.

[0013] Recent clinical studies have demonstrated the ability of this passively administered RSV hyperimmune globulin (RSV IVIG) to protect at-risk children from severe lower respiratory infection by RSV (Groothius et al., 1993, New Engl. J. Med. 329:1524-1530; and The PREVENT Study Group, 1997, Pediatrics 99:93-99). While this is a major advance in preventing RSV infection, this treatment poses certain limitations in its widespread use. First, RSV IVIG must be infused intravenously over several hours to achieve an effective dose. Second, the concentrations of active material in hyperimmune globulins are insufficient to treat adults at risk or most children with comprised cardiopulmonary function. Third, intravenous infusion necessitates monthly hospital visits during the RSV season.

[0014] Finally, it may prove difficult to select sufficient donors to produce a hyperimmune globulin for RSV to meet the demand for this product. Currently, only approximately 8% of normal donors have RSV neutralizing antibody titers high enough to qualify for the production of hyperimmune globulin.

[0015] One way to improve the specific activity of the immunoglobulin would be to develop one or more highly potent RSV neutralizing monoclonal antibodies (MAbs). Such MAbs should be human or humanized in order to retain favorable pharmacokinetics and to avoid generating a human anti-mouse antibody response, as repeat dosing would be required throughout the RSV season. Two glycoproteins, F and G, on the surface of RSV have been shown to be targets of neutralizing antibodies (Fields et al., 1990, supra; and Murphy et al., 1994, supra). These two proteins are also primarily responsible for viral recognition and entry into target cells; G protein binds to a specific cellular receptor and the F protein promotes fusion of the virus with the cell. The F protein is also expressed on the surface of infected cells and is responsible for subsequent fusion with other cells leading to syncytia formation. Thus, antibodies to the F protein may directly neutralize virus or block entry of the virus into the cell or prevent syncytia formation. Although antigenic and structural differences between A and B subtypes have been described for both the G and F proteins, the more significant antigenic differences reside on the G glycoprotein, where amino acid sequences are only 53% homologous and antigenic relatedness is 5% (Walsh et al., 1987, J. Infect. Dis. 155:1198-1204; and Johnson et al., 1987, Proc. Natl. Acad. Sci. USA 84:5625-5629). Conversely, antibodies raised to the F protein show a high degree of cross-reactivity among subtype A and B viruses. Beeler and Coelingh (1989, J. Virol. 7:2941-2950) conducted an extensive analysis of 18 different murine MAbs directed to the RSV F protein. Comparison of the biologic and biochemical properties of these MAbs resulted in the identification of three distinct antigenic sites (designated A, B, and C). Neutralization studies were performed against a panel of RSV strains isolated from 1956 to 1985 that demonstrated that epitopes within antigenic sites A and C are highly conserved, while the epitopes of antigenic site B are variable.

[0016] A humanized antibody directed to an epitope in the A antigenic site of the F protein of RSV, SYNAGIS®, is approved for intramuscular administration to pediatric patients for prevention of serious lower respiratory tract disease caused by RSV at recommended monthly doses of 15 mg/kg of body weight throughout the RSV season (November through April in the northern hemisphere). SYNAGIS® is a composite of human (95%) and murine (5%) antibody sequences. See, Johnson et al., 1997, J. Infect. Diseases 176:1215-1224 and U.S. Pat. No. 5,824,307, the entire contents of which are incorporated herein by reference. The human heavy chain sequence was derived from the constant domains of human IgG₁ and the variable framework regions of the VH genes of Cor (Press et al., 1970, Biochem. J. 117:641-660) and Cess (Takashi et al., 1984, Proc. Natl. Acad. Sci. USA 81:194-198). The human light chain sequence was derived from the constant domain of Cκ and the variable framework regions of the VL gene K104 with Jκ-4 (Bentley et al., 1980, Nature 288:5194-5198). The murine sequences derived from a murine monoclonal antibody, Mab 1129 (Beeler et al., 1989, J. Virology 63:2941-2950), in a process which involved the grafting of the murine complementarity determining regions into the human antibody frameworks.

[0017] 2.3 Avian and Human Metapneumovirus

[0018] Recently, a new member of the Paramyxoviridae family has been isolated from 28 children with clinical symptoms reminiscent of those caused by hRSV infection, ranging from mild upper respiratory tract disease to severe bronchiolitis and pneumonia (Van Den Hoogen et al., 2001, Nature Medicine 7:719-724). The new virus was named human metapneumovirus (hMPV) based on sequence homology and gene constellation. The study further showed that by the age of five years virtually all children in the Netherlands have been exposed to hMPV and that the virus has ben circulating in humans for at least half a century.

[0019] The genomic organization of human metapneumovirus is described in van den Hoogen et al, 2002, Virology 295:119-132. Human metapneumovirus has recently been isolated from patients in North America (Peret et al., 2002, J. Infect. Diseases 185:1660-1663).

[0020] Human metapneumovirus is related to avian metapneumovirus. For exampe, the F protein of hMPV is highly homologous to the F protein of APV. Alignment of the human metapneumoviral F protein with the F protein of an avian pneumovirus isolated from Mallard Duck shows 85.6% identity in the ectodomain. Alignment of the human metapneumoviral F protein with the F protein of an avian pneumovirus isolated from Turkey (subgroup B) shows 75% identity in the ectodomain. See, e.g., co-owned and co-pending Provisional Application No. 60/358,934, entitled “Recombinant Parainfluenza Virus Expression Systems and Vaccines Comprising Heterologous Antigens Derived from Metapneumovirus”, filed on Feb. 21, 2002, by Haller and Tang, which is incorporated herein by reference in its entirety.

[0021] Respiratory disease caused by an avian pneumovirus (APV) was first described in South Africa in the late 1970s (Buys et al., 1980, Turkey 28:36-46) where it had a devastating effect on the turkey industry. The disease in turkeys was characterized by sinusitis and rhinitis and was called turkey rhinotracheitis (TRT). The European isolates of APV have also been strongly implicated as factors in swollen head syndrome (SHS) in chickens (O'Brien, 1985, Vet. Rec. 117:619-620). Originally, the disease appeared in broiler chicken flocks infected with Newcastle disease virus (NDV) and was assumed to be a secondary problem associated with Newcastle disease (ND). Antibody against European APV was detected in affected chickens after the onset of SHS (Cook et al., 1988, Avian Pathol. 17:403-410), thus implicating APV as the cause.

[0022] The avian pneumovirus is a single stranded, non-segmented RNA virus that belongs to the sub-family Pneumovirinae of the family Paramyxoviridae, genus metapneumovirus (Cavanagh and Barrett, 1988, Virus Res. 11:241-256; Ling et al., 1992, J. Gen. Virol. 73:1709-1715; Yu et al., 1992, J. Gen. Virol. 73:1355-1363). The Paramyxoviridae family is divided into two sub-families: the Paramyxovirinae and Pneumovirinae. The subfamily Paramyxovirinae includes, but is not limited to, the genera: Paramyxovirus, Rubulavirus, and Morbillivirus. Recently, the sub-family Pneumovirinae was divided into two genera based on gene order, i.e. pneumovirus and metapneumovirus (Naylor et al., 1998, J. Gen. Virol., 79:1393-1398; Pringle, 1998, Arch. Virol. 143:1449-1159). The pneumovirus genus includes, but is not limited to, human respiratory syncytial virus (hRSV), bovine respiratory syncytial virus (BRSV), ovine respiratory syncytial virus, and mouse pneumovirus. The metapneumovirus genus includes, but is not limited to, European avian pneumovirus (subgroups A and B), which is distinguished from hRSV, the type species for the genus pneumovirus (Naylor et al., 1998, J. Gen. Virol., 79:1393-1398; Pringle, 1998, Arch. Virol. 143:1449-1159). The US isolate of APV represents a third subgroup (subgroup C) within metapneumovirus genus because it has been found to be antigenically and genetically different from European isolates (Seal, 1998, Virus Res. 58:45-52; Senne et al., 1998, In: Proc. 47^{th} WPDC, California, pp. 67-68).

[0023] Electron microscopic examination of negatively stained APV reveals pleomorphic, sometimes spherical, virions ranging from 80 to 200 nm in diameter with long filaments ranging from 1000 to 2000 nm in length (Collins and Gough, 1988, J. Gen. Virol. 69:909-916). The envelope is made of a membrane studded with spikes 13 to 15 nm in length. The nucleocapsid is helical, 14 nm in diameter and has 7 nm pitch. The nucleocapsid diameter is smaller than that of the genera Paramyxovirus and Morbillivirus, which usually have diameters of about 18 nm.

[0024] Avian pneumovirus infection is an emerging disease in the USA despite its presence elsewhere in the world in poultry for many years. In May 1996, a highly contagious respiratory disease of turkeys appeared in Colorado, and an APV was subsequently isolated at the National Veterinary Services Laboratory (NVSL) in Ames, Iowa (Senne et al., 1997, Proc. 134^{th} Ann. Mtg., AVMA, pp. 190). Prior to this time, the United States and Canada were considered free of avian pneumovirus (Pearson et al., 1993, In: Newly Emerging and Re-emerging Avian Diseases: Applied Research and Practical Applications for Diagnosis and Control, pp. 78-83; Hecker and Myers, 1993, Vet. Rec. 132:172). Early in 1997, the presence of APV was detected serologically in turkeys in Minnesota. By the time the first confirmed diagnosis was made, APV infections had already spread to many farms. The disease is associated with clinical signs in the upper respiratory tract: foamy eyes, nasal discharge and swelling of the sinuses. It is exacerbated by secondary infections. Morbidity in infected birds can be as high as 100%. The mortality can range from 1 to 90% and is highest in six to twelve week old poults.

[0025] Avian pneumovirus is transmitted by contact. Nasal discharge, movement of affected birds, contaminated water, contaminated equipment; contaminated feed trucks and load-out activities can contribute to the transmission of the virus. Recovered turkeys are thought to be carriers. Because the virus is shown to infect the epithelium of the oviduct of laying turkeys and because APV has been detected in young poults, egg transmission is considered a possibility.

[0026] Based upon the recent work with hMPV, hMPV likewise appears to be a significant factor in human, particularly, juvenile respiratory disease.

[0027] Thus, theses three viruses, RSV, hMPV, and PIV, cause a significant portion of human respiratory disease. What is needed is a broad spectrum prophylaxis to reduce the incidence of viral respiratory disease.

[0028] Citation or discussion of a reference herein shall not be construed as an admission that such is prior art to the present invention.

[0029] 2.4 Virus Entry into Host Cell

[0030] It is emerging that some of the enveloped viruses, e.g., retrovirus, orthomyxovirus, filovirus, and paramyxovirus, might use a fusion mechanism involving so-called heptad repeats to gain entry into a host cell (Eckert et al., 2001, Annu. Rev. Biochem. 70:777-810; Weissenhom et. al., 1999, Mol. Membr. Biol. 16:3-9; Lamb et. al., 1999, Mol. Membr. Biol. 16:11-19; Skehel et al., 2000, Annu. Rev. Biochem. 69:531-569; Bentz, J., 2000, Biophys J. 78:886-900; Peisajovich et. al., 2002, Trends Biochem. Sci. 27:183-190). According to this model, the fusion peptide located at the N-terminus of the F protein (e.g., of paramyxovirus) is exposed to insert itself into the cell membrane. Further, fusion proteins undergo conformational changes during fusion (Wang et al., 2003, Biochem. Biophys. Res. Comm. 302:469-475). The highly conserved heptad repeat (HR) regions have been implicated in facilitation of the fusion process (Wang et al., 2003, Biochem. Biophys. Res. Comm. 302:469-475). Therefore, the heptad repeats are an attractive target for the prevention of virus infection and/or propagation through the inhibition of fusion with a host cell.

### 3 SUMMARY OF THE INVENTION

[0031] The present invention provides methods for broad spectrum prevention and treatment of viral respiratory infections. Viruses are major causes of severe respiratory infections, particularly in infants, prematurely born infants, the elderly, immunocompromised patients, recipients of transplants, etc. Respiratory infections can be effectively prevented and/or treated using the combination therapies/prophylaxes provided by the present invention. The present invention provides broad spectrum combination therapy/prophylaxis comprising administering to a subject (i) one or more anti-RSV-antigen antibodies or antigen-binding fragments thereof; (ii) one or more anti-PIV-antigen antibodies or antigen-binding fragments thereof; and/or (iii) one or more anti-hMPV-antigen antibodies or antigen-binding fragments thereof. By providing to the subject a plurality of antibodies directed to antigens of a variety of viruses, the risk of respiratory viral infection is reduced in the subject. A particular advantage of administering antibodies of different immunospecificities is that different strains of viruses and viruses with naturally occuring modifications do not escape the immunity of the subject but are recognized by at least one of the plurality of antibodies.

[0032] In certain embodiments, the invention provides a method of preventing a viral infection in a subject, said method comprising administering to the subject: (i) a prophylactically effective amount of one or more first antibodies or antigen-binding fragments thereof, wherein said one or more first antibodies or antigen-binding fragments thereof bind immunospecifically to a RSV antigen; and (ii) a prophylactically effective amount of one or more second antibodies or antigen-binding fragments thereof, wherein said one or more second antibodies or antigen-binding fragments thereof bind immunospecifically to a hMPV antigen. In certain embodiments, the one or more anti-RSV-antigen antibodies or antigen-binding fragments thereof neutralize RSV. In certain embodiments, the one or more anti-hMPV-antigen antibodies or antigen-binding fragments thereof neutralize hMPV. In certain embodiments, the one or more anti-RSV-antigen antibodies or antigen-binding fragments thereof block RSV infection of cells of the subject. In certain embodiments, the one or more anti-hMPV-antigen antibodies antibodies or antigen-binding fragments thereof block hMPV infection of cells of the subject.

[0033] In certain embodiments, the invention provides a method of treating one or more symptoms of a respiratory viral infection in a subject, said method comprising administering to the subject: (i) a therapeutically effective amount of one or more first antibodies or antigen-binding fragments thereof, wherein said one or more first antibodies or antigen-binding fragments thereof bind immunospecifically to a RSV antigen; and (ii) a therapeutically effective amount of one or more second antibodies or antigen-binding fragments thereof, wherein said one or more second antibodies or antigen-binding fragments thereof bind immunospecifically to a hMPV antigen.

[0034] In certain embodiments, the invention provides a method of passive immunotherapy, said method comprising administering to a subject: (i) a first dose of one or more first antibodies or antigen-binding fragments thereof, wherein said one or more first antibodies or a fragments thereof bind immunospecifically to a RSV antigen; and (ii) a second dose of one or more second antibodies or antigen-binding fragments thereof, wherein said one or more second antibodies or a fragments thereof bind immunospecifically to a hMPV antigen, wherein the first dose reduces the incidence of RSV infection by at least 25% and wherein the second dose reduces the incidence of hMPV infection by at least 25%. In certain embodiments, the first dose reduces the incidence of RSV infection by at least 50% and wherein the second dose reduces the incidence of hMPV infection by at least 50%. In certain embodiments, the first dose reduces the incidence of RSV infection by at least 75% and wherein the second dose reduces the incidence of hMPV infection by at least 75%. In certain embodiments, the first dose reduces the incidence of RSV infection by at least 90% and wherein the second dose reduces the incidence of hMPV infection by at least 90%.

[0035] In certain embodiments, the invention provides a method of passive immunotherapy, said method comprising administering to a subject: (i) a first dose of one or more first antibodies or antigen-binding fragments thereof, wherein said one or more first antibodies or antigen-binding fragments thereof bind immunospecifically to a RSV antigen; and (ii) a second dose of one or more second antibodies or antigen-binding fragments thereof, wherein said one or more second antibodies or antigen-binding fragments thereof bind immunospecifically to a hMPV antigen, wherein the serum titer of said one or more anti-RSV-antigen antibodies or antigen-binding fragments thereof in the subject is at least 10 μg/ml after 15 days of administering said one or more anti-RSV-antigen antibodies or antigen-binding fragments thereof and wherein the serum titer of said one or more anti-hMPV-antigen antibodies or antigen-binding fragments thereof in the subject is at least 10 μg/ml after 15 days of administering said one or more anti-hMPV-antigen antibodies or antigen-binding fragments thereof.

[0036] In certain embodiments, the amino acid sequence of the RSV antigen is that of SEQ ID NO:390 to 398, respectively. In certain embodiments, the amino acid sequence of the RSV antigen is 90% identical to the amino acid sequence of RSV nucleoprotein, RSV phosphoprotein, RSV matrix protein, RSV small hydrophobic protein, RSV RNA-dependent RNA polymerase, RSV F protein, or RSV G protein. In certain embodiments, the the RSV antigen is selected from the group consisting of RSV nucleoprotein, RSV phosphoprotein, RSV matrix protein, RSV small hydrophobic protein, RSV RNA-dependent RNA polymerase, RSV F protein, and RSV G protein. In certain embodiments, the one or more anti-RSV-antigen antibodies immunospecifically bind to an antigen of Group A or Group B RSV. In certain embodiments, the RSV antigen is RSV F protein. In certain embodiments, the one or more anti-hMPV-antigen antibodies cross-react with a turkey APV antigen. In certain embodiments, the one or more anti-hMPV-antigen antibodies are (i) human or humanized antibodies and (ii) cross-react with a turkey APV antigen. In certain embodiments, the turkey APV antigen is selected from the group consisting of turkey APV nucleoprotein, turkey APV phosphoprotein, turkey APV matrix protein, turkey APV small hydrophobic protein, turkey APV RNA-dependent RNA polymerase, turkey APV F protein, and turkey APV G protein. In certain embodiments, the turkey APV antigen is an antigen of avian pneumovirus type A, avian pneumovirus type B, or avian pneumovirus type C. In certain embodiments, the amino acid sequence of said turkey APV antigen is that of SEQ ID NO:424 to 429, respectively. In certain embodiments, the amino acid sequence of the hMPV antigen is that of SEQ ID NO:399 to 406, 420, or 421, respectively. In certain embodiments, the hMPV antigen is selected from the group consisting of hMPV nucleoprotein, hMPV phosphoprotein, hMPV matrix protein, hMPV small hydrophobic protein, hMPV RNA-dependent RNA polymerase, hMPV F protein, and hMPV G protein. In certain embodiments, the hMPV antigen is hMPV F protein. In certain embodiments, the anti-RSV-antigen antibody is SYNAGIS™ (Palivizumab); AFFF; P12f2 P12f4; P11d4; Ale9; A12a6; A13c4; A17d4; A4B4; 1X-493L1; FR H3-3F4; M3H9; Y10H6; DG; AFFF(1); 6H8; L1-7E5; L2-15B10; A13a11; A1h5; A4B4(1);A4B4-F52S; or A4B4L1FR-S28R. In certain embodiments, the effective amount of said one or more anti-RSV-antigen antibodies is 100 mg/kg or less. In certain embodiments, the effective amount of said one or more anti-RSV-antigen antibodies is 10 mg/kg or less. In certain embodiments, the effective amount of said one or more anti-RSV-antigen antibodies is 1 mg/kg or less. In certain embodiments, the effective amount of said one or more anti-hMPV-antigen antibodies or antigen-binding fragments thereof is 100 mg/kg or less. In certain embodiments, the effective amount of said one or more anti-hMPV-antigen antibodies or antigen-binding fragments thereof is 10 mg/kg or less. In certain embodiments, the effective amount of said one or more anti-hMPV-antigen antibodies or antigen-binding fragments thereof is 1 mg/kg or less. In certain embodiments, the one or more anti-RSV-antigen antibodies or antigen-binding fragments thereof are administered at a time period prior to administering of said one or more anti-hMPV-antigen antibodies or antigen-binding fragments thereof. In certain embodiments, the one or more anti-hMPV-antigen antibodies or antigen-binding fragments thereof are administered at a time period prior to administering of said one or more anti-RSV-antigen antibodies or antigen-binding fragments thereof. In certain embodiments, the one or more anti-RSV-antigen antibodies or antigen-binding fragments thereof and said one or more anti-hMPV-antigen antibodies or antigen-binding fragments thereof are administered concurrently. In certain embodiments, the one or more anti-RSV-antigen antibodies or antigen-binding fragments thereof are administered in a sequence of two or more administrations, wherein the administrations of said one or more anti-RSV-antigen antibodies or antigen-binding fragments thereof are separated by a time period from each other, and wherein said one or more anti-hMPV-antigen antibodies or antigen-binding fragments thereof are administered before, during, or after the sequence. In certain embodiments, the one or more anti-RSV-antigen antibodies or antigen-binding fragments thereof are administered in a sequence of two or more administrations, wherein the administrations of said one or more anti-hMPV-antigen antibodies or antigen-binding fragments thereof are separated by a time period from each other, and wherein said one or more anti-RSV-antigen antibodies or antigen-binding fragments thereof are administered before, during, or after the sequence. In certain embodiments, the one or more anti-RSV-antigen antibodies or antigen-binding fragments thereof and said one or more anti-hMPV-antigen antibodies or antigen-binding fragments thereof are administered in a sequence of two or more administrations, wherein the administrations are separated by a time period from each other. In certain embodiments, the time period is at least 1 day, 2 days, 3 days, 4 days, 5 days, 6 days, 1 week, 2 weeks, 3 weeks, 1 month, 2 months, or 3 months. In certain embodiments, the one or more anti-RSV-antigen antibodies or antigen-binding fragments thereof and/or said one or more anti-hMPV-antigen antibodies or antigen-binding fragments thereof are administered by a nebulizer or an inhaler. In certain embodiments, the one or more anti-RSV-antigen antibodies or antigen-binding fragments thereof and/or said one or more anti-hMPV-antigen antibodies or antigen-binding fragments thereof are administered intramuscularly, intravenously or subcutaneously. In certain embodiments, the viral infection is an infection with RSV and hMPV. In certain embodiments, the viral infection is an infection with RSV and APV. In certain embodiments, at least one of said antibodies is a monoclonal antibody, a synthetic antibody, an intrabody, a chimeric antibody, a human antibody, a humanized chimeric antibody, a humanized antibody, a glycosylated antibody, a multispecific antibody, a human antibody, a single-chain antibody, or a bispecific antibody. In certain embodiments, at least one of said antibodies is a human antibody. In certain embodiments, at least one of said antibodies is a humanized antibody. In certain embodiments, at least one of said antibodies is a synthetic antibody. In certain embodiments, the subject is a mammal. In certain embodiments, the mammal is a primate. In certain embodiments, the primate is a human. In certain embodiments, the human is an elderly human. In certain embodiments, the human is a transplant recipient. In certain embodiments, the human is an immunocompromised patient. In certain embodiments, the human is an A/DS patient. In certain embodiments, the human is an infant. In certain embodiments, the human has cystic fibrosis, bronchopulmonary dysplasia, congenital heart disease, congenital immunodeficiency, or acquired immunodeficiency or has had a bone marrow transplant. In certain embodiments, infant was born prematurely or is at risk of hospitalization for a RSV infection and/or for a hMPV infection. In certain embodiments, the human infant was born prematurely. In certain embodiments, the infant is less than 32 weeks of gestational age. In certain embodiments, the infant is between 32 and 35 weeks of gestational age. In certain embodiments, the infant is more than 35 weeks of gestational age. In certain embodiments, the infant is more than 38 weeks of gestational age. In certain embodiments, the mammal is not a primate. In certain embodiments, the non-primate mammal is an animal model for RSV infection and/or hMPV infection. In certain embodiments, the non-primate mammal is a cotton rat. In certain embodiments, the antibody is administered once a month just prior to and during the RSV season. In certain embodiments, the antibody is administered every two months just prior to and during the RSV season. In certain embodiments, the antibody is administered once just prior to or during the RSV season. In certain embodiments, at least one of said fragments is a Fab fragment, a F(ab′) fragment, a F(ab′)₂ fragment, a Fd, a single-chain Fv, a disulfide-linked Fv, a fragment comprising a V_{L} domain, or a fragment comprising a V_{H} domain.

[0037] In certain embodiments, the invention provides a method of preventing a viral infection in a subject, said method comprising administering to the subject: (i) a dose of one or more antibodies or antigen-binding fragments thereof, wherein said one or more antibodies or antigen-binding fragments thereof (i) are human or humanized, (ii) cross-react with a turkey APV antigen, and (iii) bind immunospecifically to a hMPV antigen.

[0038] In certain embodiments, the invention provides method of treating one or more symptoms of a respiratory viral infection in a subject, said method comprising administering to the subject: (i) a dose of one or more antibodies or antigen-binding fragments thereof, wherein said one or more antibodies or antigen-binding fragments thereof (i) are human or humanized, (ii) cross-react with a turkey APV antigen, and (iii) bind immunospecifically to a hMPV antigen.

[0039] In certain embodiments, the invention provides a method of passive immunotherapy, said method comprising administering to a subject: (i) a dose of one or more antibodies or antigen-binding fragments thereof, wherein said one or more antibodies or antigen-binding fragments thereof (i) are human or humanized, (ii) cross-react with a turkey APV antigen, and (iii) bind immunospecifically to a hMPV antigen, wherein the dose reduces the incidence of hMPV infection by at least 25%. In certain embodiments, wherein the dose reduces the incidence of hMPV infection by at least 50%. In certain embodiments, wherein the dose reduces the incidence of hMPV infection by at least 75%. In certain embodiments, wherein the dose reduces the incidence of hMPV infection by at least 90%.

[0040] In certain embodiments, the invention provides a method of passive immunotherapy, said method comprising administering to a subject: (i) a dose of one or more antibodies or antigen-binding fragments thereof, wherein said one or more antibodies or antigen-binding fragments thereof (i) are human or humanized, (ii) cross-react with a turkey APV antigen, and (iii) bind immunospecifically to a hMPV antigen, wherein the serum titer of said one or more antibodies or antigen-binding fragments thereof in the subject is at least 10 μg/ml after 15 days of administering said one or more antibodies or antigen-binding fragments thereof.

[0041] In certain embodiments, the invention provides a pharmaceutical composition, said composition comprising: (i) one or more first antibodies or antigen-binding fragments thereof, wherein said one or more first antibodies or antigen-binding fragments thereof bind immunospecifically to a RSV antigen; and (ii) one or more second antibodies or antigen-binding fragments thereof, wherein said one or more second antibodies or antigen-binding fragments thereof bind immunospecifically to a hMPV antigen. In certain embodiments, the amino acid sequence of the RSV antigen is that of SEQ ID NO:390 to 398, respectively. In certain embodiments, the amino acid sequence of the RSV antigen is 90% identical to the amino acid sequence of RSV nucleoprotein, RSV phosphoprotein, RSV matrix protein, RSV small hydrophobic protein, RSV RNA-dependent RNA polymerase, RSV F protein, or RSV G protein. In certain embodiments, the RSV antigen is selected from the group consisting of RSV nucleoprotein, RSV phosphoprotein, RSV matrix protein, RSV small hydrophobic protein, RSV RNA-dependent RNA polymerase, RSV F protein, and RSV G protein. In certain embodiments, said one or more anti-RSV-antigen antibodies or antigen-binding fragments thereof immunospecifically bind to an antigen of Group A or Group B RSV. In certain embodiments, the RSV antigen is RSV F protein. In certain embodiments, said one or more anti-hMPV-antigen antibodies cross-react with a turkey APV antigen. In certain embodiments, said one or more anti-hMPV-antigen antibodies are (i) human or humanized antibodies and (ii) cross-react with a turkey APV antigen. In certain embodiments, said turkey APV antigen is selected from the group consisting of turkey APV nucleoprotein, turkey APV phosphoprotein, turkey APV matrix protein, turkey APV small hydrophobic protein, turkey APV RNA-dependent RNA polymerase, turkey APV F protein, and turkey APV G protein. In certain embodiments, said turkey APV antigen is an antigen of avian pneumovirus type A, avian pneumovirus type B, or avian pneumovirus type C. In certain embodiments, the amino acid sequence of said turkey APV antigen is that of SEQ ID NO:424 to 429, respectively. In certain embodiments, the amino acid sequence of the hMPV antigen is that of SEQ ID NO:399 to 406, 420, or 421, respectively. In certain embodiments, the hMPV antigen is selected from the group consisting of hMPV nucleoprotein, hMPV phosphoprotein, hMPV matrix protein, hMPV small hydrophobic protein, hMPV RNA-dependent RNA polymerase, hMPV F protein, and hMPV G protein. In certain embodiments, the hMPV antigen is hMPV F protein. In certain embodiments, the anti-RSV-antigen antibody is SYNAGIS™; AFFF; P12f2 P12f4; P11d4; Ale9; A12a6; A13c4; A17d4; A4B4; 1X-493L1; FR H3-3F4; M3H9; Y10H6; DG; AFFF(1); 6H8; L1-7E5; L2-15B10; A13a11; A1h5; A4B4(1);A4B4-F52S; or A4B4L1FR-S28R. In certain embodiments, at least one of said antibodies is a monoclonal antibody, a synthetic antibody, an intrabody, a chimeric antibody, a human antibody, a humanized chimeric antibody, a humanized antibody, a glycosylated antibody, a multispecific antibody, a human antibody, a single-chain antibody, or a bispecific antibody. In certain embodiments, at least one of said antibodies is a human antibody. In certain embodiments, at least one of said antibodies is a humanized antibody. In certain embodiments, at least one of said antibodies is a synthetic antibody. In certain embodiments, at least one of said fragments is a Fab fragment, a F(ab′) fragment, a F(ab′)₂ fragment, a Fd, a single-chain Fv, a disulfide-linked Fv, a fragment comprising a V_{L} domain, or a fragment comprising a V_{H} domain.

[0042] In certain embodiments, the application provides a pharmaceutical composition, said composition comprising: one or more antibodies or antigen-binding fragments thereof, wherein said one or more antibodies or antigen-binding fragments thereof (i) are human or humanized, (ii) cross-react with a turkey APV antigen, and (iii) bind immunospecifically to a hMPV antigen.

[0043] In certain embodiments, the invention provides a method comprising administering to the subject: (i) a prophylactically effective amount of one or more first antibodies or antigen-binding fragments thereof, wherein said one or more first antibodies or antigen-binding fragments thereof bind immunospecifically to a PIV antigen; and (ii) a prophylactically effective amount of one or more second antibodies or antigen-binding fragments thereof, wherein said one or more second antibodies or antigen-binding fragments thereof bind immunospecifically to a hMPV antigen. In certain embodiments, said one or more anti-PIV-antigen antibodies or antigen-binding fragments thereof neutralize PIV. In certain embodiments, said one or more anti-hMPV-antigen antibodies or antigen-binding fragments thereof neutralize hMPV. In certain embodiments, said one or more anti-PIV-antigen antibodies or antigen-binding fragments thereof block PIV infection of cells of the subject. In certain embodiments, said one or more anti-hMPV-antigen antibodies or antigen-binding fragments thereof block hMPV infection of cells of the subject.

[0044] In certain embodiments, the invention provides a method of treating one or more symptoms of a respiratory viral infection in a subject, said method comprising administering to the subject: (i) a therapeutically effective amount of one or more first antibodies or antigen-binding fragments thereof, wherein said one or more first antibodies or antigen-binding fragments thereof bind immunospecifically to a PIV antigen; and (ii) a therapeutically effective amount of one or more second antibodies or antigen-binding fragments thereof, wherein said one or more second antibodies or antigen-binding fragments thereof bind immunospecifically to a hMPV antigen.

[0045] In certain embodiments, the invention provides a method of passive immunotherapy, said method comprising administering to a subject: (i) a first dose of one or more first antibodies or antigen-binding fragments thereof, wherein said one or more first antibodies or a fragments thereof bind immunospecifically to a PIV antigen; and (ii) a second dose of one or more second antibodies or antigen-binding fragments thereof, wherein said one or more second antibodies or a fragments thereof bind immunospecifically to a hMPV antigen, wherein the first dose reduces the incidence of PIV infection by at least 25% and wherein the second dose reduces the incidence of hMPV infection by at least 25%. In certain embodiments, the first dose reduces the incidence of PIV infection by at least 50% and wherein the second dose reduces the incidence of hMPV infection by at least 50%. In certain embodiments, the first dose reduces the incidence of PIV infection by at least 75% and wherein the second dose reduces the incidence of hMPV infection by at least 75%. In certain embodiments, the first dose reduces the incidence of PIV infection by at least 90% and wherein the second dose reduces the incidence of hMPV infection by at least 90%.

[0046] In certain embodiments, the invention provides a method of passive immunotherapy, said method comprising administering to a subject: (i) a first dose of one or more anti-PIV-antigen antibodies or antigen-binding fragments thereof, wherein said one or more first antibodies or antigen-binding fragments thereof bind immunospecifically to a PIV antigen; and (ii) a second dose of one or more anti-hMPV-antigen antibodies or antigen-binding fragments thereof, wherein said one or more anti-hMPV-antigen antibodies or antigen-binding fragments thereof bind immunospecifically to a hMPV antigen, wherein the serum titer of said one or more anti-PIV-antigen antibodies or antigen-binding fragments thereof in the subject is at least 10 μg/ml after 15 days of administering said one or more anti-PIV-antigen antibodies or antigen-binding fragments thereof and wherein the serum titer of said one or more anti-hMPV-antigen antibodies or antigen-binding fragments thereof in the subject is at least 10 μg/ml after 15 days of administering said one or more anti-hMPV-antigen antibodies or antigen-binding fragments thereof. In certain embodiments, the amino acid sequence of the PIV antigen is that of SEQ ID NO:407 to 419, respectively. In certain embodiments, the amino acid sequence of the PIV antigen is 90% identical to the amino acid sequence of PIV nucleocapsid phosphoprotein, PIV L protein, PIV matrix protein, PIV HN glycoprotein, PIV RNA-dependent RNA polymerase, PIV Y1 protein, PIV D protein, or PIV C protein. In certain embodiments, the PIV antigen is selected from the group consisting of PIV nucleocapsid phosphoprotein, PIV L protein, PIV matrix protein, PIV HN glycoprotein, PIV RNA-dependent RNA polymerase, PIV Y1 protein, PIV D protein, or PIV C protein. In certain embodiments, said one or more anti-hMPV-antigen antibodies immunospecifically bind to an antigen of human PIV type 1, human PIV type 2, human PIV type 3, or human PIV type 4. In certain embodiments, the PIV antigen is PIV F protein. In certain embodiments, said one or more anti-hMPV-antigen antibodies cross-react with a turkey APV antigen. In certain embodiments, said one or more anti-hMPV-antigen antibodies are (i) human or humanized antibodies and (ii) cross-react with a turkey APV antigen. In certain embodiments, said turkey APV antigen is selected from the group consisting of turkey APV nucleoprotein, turkey APV phosphoprotein, turkey APV matrix protein, turkey APV small hydrophobic protein, turkey APV RNA-dependent RNA polymerase, turkey APV F protein, and turkey APV G protein. In certain embodiments, said turkey APV antigen is an antigen of avian pneumovirus type A, avian pneumovirus type B, or avian pneumovirus type C. In certain embodiments, the amino acid sequence of said turkey APV antigen is that of SEQ ID NO:424 to 429, respectively. In certain embodiments, the amino acid sequence of the hMPV antigen is that of SEQ ID NO:399-406, 420, or 421, respectively. In certain embodiments, the hMPV antigen is selected from the group consisting of hMPV nucleoprotein, hMPV phosphoprotein, hMPV matrix protein, hMPV small hydrophobic protein, hMPV RNA-dependent RNA polymerase, hMPV F protein, and hMPV G protein. In certain embodiments, the hMPV antigen is hMPV F protein. In certain embodiments, the effective amount of said one or more anti-PIV-antigen antibodies is 100 mg/kg or less. In certain embodiments, the effective amount of said one or more anti-PIV-antigen antibodies is 10 mg/kg or less. In certain embodiments, the effective amount of said one or more anti-PIV-antigen antibodies is 1 mg/kg or less. In certain embodiments, the effective amount of said one or more anti-hMPV-antigen antibodies or antigen-binding fragments thereof is 100 mg/kg or less. In certain embodiments, the effective amount of said one or more anti-hMPV-antigen antibodies or antigen-binding fragments thereof is 10 mg/kg or less. In certain embodiments, the effective amount of said one or more anti-hMPV-antigen antibodies or antigen-binding fragments thereof is 1 mg/kg or less. In certain embodiments, said one or more anti-PIV-antigen antibodies or antigen-binding fragments thereof are administered at a time period prior to administering of said one or more anti-hMPV-antigen antibodies or antigen-binding fragments thereof. In certain embodiments, said one or more anti-hMPV-antigen antibodies or antigen-binding fragments thereof are administered at a time period prior to administering of said one or more anti-PIV-antigen antibodies or antigen-binding fragments thereof. In certain embodiments, said one or more anti-PIV-antigen antibodies or antigen-binding fragments thereof and said one or more anti-hMPV-antigen antibodies or antigen-binding fragments thereof are administered concurrently. In certain embodiments, said one or more anti-PIV-antigen antibodies or antigen-binding fragments thereof are administered in a sequence of two or more administrations, wherein the administrations of said one or more anti-PIV-antigen antibodies or antigen-binding fragments thereof are separated by a time period from each other, and wherein said one or more anti-hMPV-antigen antibodies or antigen-binding fragments thereof are administered before, during, or after the sequence. In certain embodiments, said one or more anti-PIV-antigen antibodies or antigen-binding fragments thereof are administered in a sequence of two or more administrations, wherein the administrations of said one or more anti-hMPV-antigen antibodies or antigen-binding fragments thereof are separated by a time period from each other, and wherein said one or more anti-PIV-antigen antibodies or antigen-binding fragments thereof are administered before, during, or after the sequence. In certain embodiments, said one or more anti-PIV-antigen antibodies or antigen-binding fragments thereof and said one or more anti-hMPV-antigen antibodies or antigen-binding fragments thereof are administered in a sequence of two or more administrations, wherein the administrations are separated by a time period from each other. In certain embodiments, the time period is at least 1 day, 2 days, 3 days, 4 days, 5 days, 6 days, 1 week, 2 weeks, 3 weeks, 1 month, 2 months, or 3 months. In certain embodiments, said one or more anti-PIV-antigen antibodies or antigen-binding fragments thereof and/or said one or more anti-hMPV-antigen antibodies or antigen-binding fragments thereof are administered by a nebulizer or an inhaler. In certain embodiments, said one or more anti-PIV-antigen antibodies or antigen-binding fragments thereof and/or said one or more anti-hMPV-antigen antibodies or antigen-binding fragments thereof are administered intramuscularly, intravenously or subcutaneously. In certain embodiments, the viral infection is an infection with PIV and hMPV. In certain embodiments, the viral infection is an infection with PIV and APV. In certain embodiments, at least one of said antibodies is a monoclonal antibody, a synthetic antibody, an intrabody, a chimeric antibody, a human antibody, a humanized chimeric antibody, a humanized antibody, a glycosylated antibody, a multispecific antibody, a human antibody, a single-chain antibody, or a bispecific antibody. In certain embodiments, at least one of said antibodies is a human antibody. In certain embodiments, at least one of said antibodies is a humanized antibody. In certain embodiments, at least one of said antibodies is a synthetic antibody. In certain embodiments, the subject is a mammal. In certain embodiments, the mammal is a primate. In certain embodiments, the primate is a human. In certain embodiments, the human is an elderly human. In certain embodiments, the human is a transplant recipient. In certain embodiments, the human is an immunocompromised patient. In certain embodiments, the human is an AIDS patient. In certain embodiments, the human is an infant. In certain embodiments, the human has cystic fibrosis, bronchopulmonary dysplasia, congenital heart disease, congenital immunodeficiency, or acquired immunodeficiency or has had a bone marrow transplant. In certain embodiments, the infant was born prematurely or is at risk of hospitalization for a PUV infection and/or a hMPV infection. In certain embodiments, the infant was born prematurely. In certain embodiments, the infant is less than 32 weeks of gestational age. In certain embodiments, the infant is 32 and 35 weeks of gestational age. In certain embodiments, the infant is 35 weeks of gestational age. In certain embodiments, infant is more than 38 weeks of gestational age. In certain embodiments, the mammal is not a primate. In certain embodiments, the non-primate mammal is an animal model for PIV infection and/or hMPV infection. In certain embodiments, the non-primate mammal is a cotton rat. In certain embodiments, the antibody is administered once a month just prior to and during the PIV season. In certain embodiments, the antibody is administered every two months just prior to and during the PIV season. In certain embodiments, the antibody is administered once just prior to or during the PIV season. In certain embodiments, at least one of said fragments is a Fab fragment, a F(ab′) fragment, a F(ab′)₂ fragment, a Fd, a single-chain Fv, a disulfide-linked Fv, a fragment comprising a V_{L} domain, or a fragment comprising a V_{H} domain.

[0047] In certain embodiments, the invention provides a method of preventing a viral infection in a subject, said method comprising administering to the subject: (i) a prophylactically effective amount of one or more first antibodies or antigen-binding fragments thereof, wherein said one or more first antibodies or antigen-binding fragments thereof bind immunospecifically to a RSV antigen; (ii) a prophylactically effective amount of one or more second antibodies or antigen-binding fragments thereof, wherein said one or more second antibodies or antigen-binding fragments thereof bind immunospecifically to a hMPV antigen; and (iii) a prophylactically effective amount of one or more third antibodies or antigen-binding fragments thereof, wherein said one or more third antibodies or antigen-binding fragments thereof bind immunospecifically to a PIV antigen. In certain embodiments, said one or more anti-RSV-antigen antibodies or antigen-binding fragments thereof neutralize RSV. In certain embodiments, said one or more anti-hMPV-antigen antibodies or antigen-binding fragments thereof neutralize hMPV. In certain embodiments, said one or more anti-PIV-antigen antibodies or antigen-binding fragments thereof neutralize PIV. In certain embodiments, said one or more anti-RSV-antigen antibodies or antigen-binding fragments thereof block RSV infection of cells of the subject. In certain embodiments, said one or more anti-hMPV-antigen antibodies or antigen-binding fragments thereof block hMPV infection of cells of the subject. In certain embodiments, said one or more anti-PIV-antigen antibodies or antigen-binding fragments thereof block PIV infection of cells of the subject.

[0048] In certain embodiments, the invention provides a method of treating one or more symptoms of a respiratory viral infection in a subject, said method comprising administering to the subject: (i) a therapeutically effective amount of one or more first antibodies or antigen-binding fragments thereof, wherein said one or more first antibodies or antigen-binding fragments thereof bind immunospecifically to a RSV antigen; (ii) a therapeutically effective amount of one or more second antibodies or antigen-binding fragments thereof, wherein said one or more second antibodies or antigen-binding fragments thereof bind immunospecifically to a hMPV antigen; and (iii) a therapeutically effective amount of one or more third antibodies or antigen-binding fragments thereof, wherein said one or more third antibodies or antigen-binding fragments thereof bind immunospecifically to a PIV antigen.

[0049] In certain embodiments, the invention provides a method of passive immunotherapy, said method comprising administering to a subject: (i) a first dose of one or more first antibodies or antigen-binding fragments thereof, wherein said one or more first antibodies or a fragments thereof bind immunospecifically to a RSV antigen; (ii) a second dose of one or more second antibodies or antigen-binding fragments thereof, wherein said one or more second antibodies or a fragments thereof bind immunospecifically to a hMPV antigen; and (iii) a third dose of one or more third antibodies or antigen-binding fragments thereof, wherein said one or more third antibodies or antigen-binding fragments thereof bind immunospecifically to a PIV antigen, wherein the first dose reduces the incidence of RSV infection by at least 25%, wherein the second dose reduces the incidence of hMPV infection by at least 25%, and wherein the third dose reduces the incidence of PIV infection by at least 25%. In certain embodiments, the first dose reduces the incidence of RSV infection by at least 50%, the second dose reduces the incidence of hMPV infection by at least 50%, and the third dose reduces the incidence of PIV infection by at least 50%. In certain embodiments, the first dose reduces the incidence of RSV infection by at least 75%, the second dose reduces the incidence of hMPV infection by at least 75%, and the third dose reduces the incidence of PIV infection by at least 75%. In certain embodiments, the first dose reduces the incidence of RSV infection by at least 90%, the second dose reduces the incidence of hMPV infection by at least 90%, and the third antibody reduces the incidence of PIV infection by at least 90%.

[0050] In certain embodiments, the invention provides a method of passive immunotherapy, said method comprising administering to a subject: (i) a first dose of one or more first antibodies or antigen-binding fragments thereof, wherein said one or more first antibodies or antigen-binding fragments thereof bind immunospecifically to a RSV antigen; (ii) a second dose of one or more second antibodies or antigen-binding fragments thereof, wherein said one or more second antibodies or antigen-binding fragments thereof bind immunospecifically to a hMPV antigen; and (iii) a third dose of one or more third antibodies or antigen-binding fragments thereof, wherein said one or more third antibodies or antigen-binding fragments thereof bind immunospecifically to a PIV antigen, wherein the serum titer of said one or more anti-RSV-antigen antibodies or antigen-binding fragments thereof in the subject is at least 10 μg/ml after 15 days of administering said one or more anti-RSV-antigen antibodies or antigen-binding fragments thereof, wherein the serum titer of said one or more anti-hMPV-antigen antibodies or antigen-binding fragments thereof in the subject is at least 10 μg/ml after 15 days of administering said one or more anti-hMPV-antigen antibodies or antigen-binding fragments thereof, and wherein the serum titer of said one or more anti-PIV-antigen antibodies or antigen-binding fragments thereof in the subject is at least 10 μg/ml after 15 days of administering said one or more anti-PIV-antigen antibodies or antigen-binding fragments thereof. In certain embodiments, the amino acid sequence of the PIV antigen is that of SEQ ID NO:407 to 419, respectively. In certain embodiments, the amino acid sequence of the PIV antigen is 90% identical to the amino acid sequence of PIV nucleoprotein, PIV phosphoprotein, PIV matrix protein, PIV small hydrophobic protein, PIV RNA-dependent RNA polymerase, PIV F protein, or PIV G protein. In certain embodiments, the PIV antigen is selected from the group consisting of PIV nucleoprotein, PIV phosphoprotein, PIV matrix protein, PIV small hydrophobic protein, PIV RNA-dependent RNA polymerase, PIV F protein, and PIV G protein.

[0051] In certain embodiments, the invention provides a method of preventing a viral infection in a subject, said method comprising administering to the subject: (i) a prophylactically effective amount of one or more first antibodies or antigen-binding fragments thereof, wherein said one or more first antibodies or antigen-binding fragments thereof bind immunospecifically to a RSV antigen; and (ii) a prophylactically effective amount of one or more second antibodies or antigen-binding fragments thereof, wherein said one or more second antibodies or antigen-binding fragments thereof bind immunospecifically to a PIV antigen. In certain embodiments, said one or more anti-RSV-antigen antibodies or antigen-binding fragments thereof neutralize RSV. In certain embodiments, said one or more anti-PIV-antigen antibodies or antigen-binding fragments thereof neutralize PIV. In certain embodiments, said one or more anti-RSV-antigen antibodies or antigen-binding fragments thereof block RSV infection of cells of the subject. In certain embodiments, said one or more anti-PIV-antigen antibodies or antigen-binding fragments thereof block PIV infection of cells of the subject.

[0052] In certain embodiments, the invention provides a method of treating one or more symptoms of a respiratory viral infection in a subject, said method comprising administering to the subject: (i) a therapeutically effective amount of one or more first antibodies or antigen-binding fragments thereof, wherein said one or more first antibodies or antigen-binding fragments thereof bind immunospecifically to a RSV antigen; and (ii) a therapeutically effective amount of one or more second antibodies or antigen-binding fragments thereof, wherein said one or more second antibodies or antigen-binding fragments thereof bind immunospecifically to a PIV antigen.

[0053] In certain embodiments, the invention provides a method of passive immunotherapy, said method comprising administering to a subject: (i) a first dose of one or more first antibodies or antigen-binding fragments thereof, wherein said one or more first antibodies or a fragments thereof bind immunospecifically to a RSV antigen; and (ii) a second dose of one or more second antibodies or antigen-binding fragments thereof, wherein said one or more second antibodies or a fragments thereof bind immunospecifically to a PIV antigen, wherein the first dose reduces the incidence of RSV infection by at least 25% and wherein the second dose reduces the incidence of PIV infection by at least 25%. In certain embodiments, the first dose reduces the incidence of RSV infection by at least 50% and wherein the second dose reduces the incidence of hMPV infection by at least 50%. In certain embodiments, the first dose reduces the incidence of RSV infection by at least 75% and wherein the second dose reduces the incidence of hMPV infection by at least 75%. In certain embodiments, the first dose reduces the incidence of RSV infection by at least 90% and wherein the second dose reduces the incidence of hMPV infection by at least 90%.

[0054] In certain embodiments, the invention provides a method of passive immunotherapy, said method comprising administering to a subject: (i) a first dose of one or more first antibodies or antigen-binding fragments thereof, wherein said one or more first antibodies or antigen-binding fragments thereof bind immunospecifically to a RSV antigen; and (ii) a second dose of one or more second antibodies or antigen-binding fragments thereof, wherein said one or more second antibodies or antigen-binding fragments thereof bind immunospecifically to a PIV antigen, wherein the serum titer of said one or more anti-RSV-antigen antibodies or antigen-binding fragments thereof in the subject is at least 10 μg/ml after 15 days of administering said one or more anti-RSV-antigen antibodies or antigen-binding fragments thereof and wherein the serum titer of said one or more anti-PIV-antigen antibodies or antigen-binding fragments thereof in the subject is at least 10 μg/ml after 15 days of administering said one or more anti-PIV-antigen antibodies or antigen-binding fragments thereof.

[0055] 3.1 Preferred Embodiments

[0056] In certain embodiments, the invention provides a method of preventing a viral infection in a subject, said method comprising administering to the subject: (i) a prophylactically effective amount of one or more first antibodies or antigen-binding fragments thereof, wherein one or more of said first antibodies or antigen-binding fragments thereof bind immunospecifically to a RSV antigen; and (ii) a prophylactically effective amount of one or more second antibodies or antigen-binding fragments thereof, wherein one or more of said second antibodies or antigen-binding fragments thereof bind immunospecifically to a hMPV antigen.

[0057] In certain embodiments, the invention provides a method wherein one or more of said first antibodies or antigen-binding fragments thereof neutralize RSV.

[0058] In certain embodiments, the invention provides a method wherein one or more of said second antibodies or antigen-binding fragments thereof neutralize hMPV.

[0059] In certain embodiments, the invention provides a method wherein one or more of said first antibodies or antigen-binding fragments thereof block RSV infection of cells of the subject.

[0060] In certain embodiments, the invention provides a method wherein one or more of said second antibodies or antigen-binding fragments thereof block hMPV infection of cells of the subject.

[0061] In certain embodiments, the invention provides a method of treating one or more symptoms of a respiratory viral infection in a subject, said method comprising administering to the subject: (i) a therapeutically effective amount of one or more first antibodies or antigen-binding fragments thereof, wherein one or more of said first antibodies or antigen-binding fragments thereof bind immunospecifically to a RSV antigen; and (ii) a therapeutically effective amount of one or more second antibodies or antigen-binding fragments thereof, wherein one or more of said second antibodies or antigen-binding fragments thereof bind immunospecifically to a hMPV antigen.

[0062] In certain embodiments, the invention provides a method of passive immunotherapy, said method comprising administering to a subject: (i) a first dose of one or more first antibodies or antigen-binding fragments thereof, wherein one or more of said first antibodies or a fragments thereof bind immunospecifically to a RSV antigen; and (ii) a second dose of one or more second antibodies or antigen-binding fragments thereof, wherein one or more of said second antibodies or a fragments thereof bind immunospecifically to a hMPV antigen, wherein the first dose reduces the incidence of RSV infection by at least 25% and wherein the second dose reduces the incidence of hMPV infection by at least 25%.

[0063] In certain embodiments, the invention provides a method wherein the first dose reduces the incidence of RSV infection by at least 50% and wherein the second dose reduces the incidence of hMPV infection by at least 50%.

[0064] In certain embodiments, the invention provides a method wherein the first dose reduces the incidence of RSV infection by at least 75% and wherein the second dose reduces the incidence of hMPV infection by at least 75%.

[0065] In certain embodiments, the invention provides a method wherein the first dose reduces the incidence of RSV infection by at least 90% and wherein the second dose reduces the incidence of hMPV infection by at least 90%.

[0066] In certain embodiments, the invention provides a method of passive immunotherapy, said method comprising administering to a subject: (i) a first dose of one or more first antibodies or antigen-binding fragments thereof, wherein one or more of said first antibodies or antigen-binding fragments thereof bind immunospecifically to a RSV antigen; and (ii) a second dose of one or more second antibodies or antigen-binding fragments thereof, wherein one or more of said second antibodies or antigen-binding fragments thereof bind immunospecifically to a hMPV antigen, wherein the serum titer of one or more of said first antibodies or antigen-binding fragments thereof in the subject is at least 10 μg/ml after 15 days of administering one or more of said first antibodies or antigen-binding fragments thereof and wherein the serum titer of one or more of said second antibodies or antigen-binding fragments thereof in the subject is at least 10 μg/ml after 15 days of administering one or more of said second antibodies or antigen-binding fragments thereof.

[0067] In certain embodiments, the invention provides a method wherein the amino acid sequence of the RSV antigen is that of SEQ ID NO:390 to 398, respectively.

[0068] In certain embodiments, the invention provides a method wherein the amino acid sequence of the RSV antigen is 90% identical to the amino acid sequence of RSV nucleoprotein, RSV phosphoprotein, RSV matrix protein, RSV small hydrophobic protein, RSV RNA-dependent RNA polymerase, RSV F protein, or RSV G protein.

[0069] In certain embodiments, the invention provides a method wherein the RSV antigen is selected from the group consisting of RSV nucleoprotein, RSV phosphoprotein, RSV matrix protein, RSV small hydrophobic protein, RSV RNA-dependent RNA polymerase, RSV F protein, and RSV G protein.

[0070] In certain embodiments, the invention provides a method wherein one or more of said first antibodies immunospecifically bind to an antigen of Group A or Group B RSV.

[0071] In certain embodiments, the invention provides a method wherein the RSV antigen is RSV F protein.

[0072] In certain embodiments, the invention provides a method wherein one or more of said second antibodies cross-react with a turkey APV antigen.

[0073] In certain embodiments, the invention provides a method wherein one or more of said second antibodies are (i) human or humanized antibodies and (ii) cross-react with a turkey APV antigen.

[0074] In certain embodiments, the invention provides a method wherein said turkey APV antigen is selected from the group consisting of turkey APV nucleoprotein, turkey APV phosphoprotein, turkey APV matrix protein, turkey APV small hydrophobic protein, turkey APV RNA-dependent RNA polymerase, turkey APV F protein, and turkey APV G protein.

[0075] In certain embodiments, the invention provides a method wherein said turkey APV antigen is an antigen of avian pneumovirus type A, avian pneumovirus type B, or avian pneumovirus type C.

[0076] In certain embodiments, the invention provides a method wherein the amino acid sequence of said turkey APV antigen is that of SEQ ID NO:424 to 429, respectively.

[0077] In certain embodiments, the invention provides a method wherein the amino acid sequence of the hMPV antigen is that of SEQ ID NO: 399-406, 420, or 421, respectively.

[0078] In certain embodiments, the invention provides a method wherein the hMPV antigen is selected from the group consisting of hMPV nucleoprotein, hMPV phosphoprotein, hMPV matrix protein, hMPV small hydrophobic protein, hMPV RNA-dependent RNA polymerase, hMPV F protein, and hMPV G protein.

[0079] In certain embodiments, the invention provides a method wherein the hMPV antigen is hMPV F protein.

[0080] In certain embodiments, the invention provides a method wherein the first antibody is Palivizumab; AFFF; P12f2 P12f4; P11d4; Ale9; A12a6; A13c4; A17d4; A4B4; 1X-493L1; FR H3-3F4; M3H9; Y10H6; DG; AFFF(1); 6H8; L1-7E5; L2-15B10; A13a11; A1h5; A4B4(1);A4B4-F52S; or A4B4L1FR-S28R.

[0081] In certain embodiments, the invention provides a method wherein the effective amount of one or more of said first antibodies is 15 mg/kg or less.

[0082] In certain embodiments, the invention provides a method wherein the effective amount of one or more of said first antibodies is 10 mg/kg or less.

[0083] In certain embodiments, the invention provides a method wherein the effective amount of one or more of said first antibodies is 1 mg/kg or less.

[0084] In certain embodiments, the invention provides a method wherein the effective amount of one or more of said second antibodies or antigen-binding fragments thereof is 15 mg/kg or less.

[0085] In certain embodiments, the invention provides a method wherein the effective amount of one or more of said second antibodies or antigen-binding fragments thereof is 10 mg/kg or less.

[0086] In certain embodiments, the invention provides a method wherein the effective amount of one or more of said second antibodies or antigen-binding fragments thereof is 1 mg/kg or less.

[0087] In certain embodiments, the invention provides a method wherein one or more of said first antibodies or antigen-binding fragments thereof are administered at a time period prior to administering of one or more of said second antibodies or antigen-binding fragments thereof.

[0088] In certain embodiments, the invention provides a method wherein one or more of said second antibodies or antigen-binding fragments thereof are administered at a time period prior to administering of one or more of said first antibodies or antigen-binding fragments thereof.

[0089] In certain embodiments, the invention provides a method wherein one or more of said first antibodies or antigen-binding fragments thereof and one or more of said second antibodies or antigen-binding fragments thereof are administered concurrently.

[0090] In certain embodiments, the invention provides a method wherein one or more of said first antibodies or antigen-binding fragments thereof are administered in a sequence of two or more administrations, wherein the administrations of one or more of said first antibodies or antigen-binding fragments thereof are separated by a time period from each other, and wherein one or more of said second antibodies or antigen-binding fragments thereof are administered before, during, or after the sequence.

[0091] In certain embodiments, the invention provides a method wherein one or more of said first antibodies or antigen-binding fragments thereof are administered in a sequence of two or more administrations, wherein the administrations of one or more of said second antibodies or antigen-binding fragments thereof are separated by a time period from each other, and wherein one or more of said first antibodies or antigen-binding fragments thereof are administered before, during, or after the sequence.

[0092] In certain embodiments, the invention provides a method wherein one or more of said first antibodies or antigen-binding fragments thereof and one or more of said second antibodies or antigen-binding fragments thereof are administered in a sequence of two or more administrations, wherein the administrations are separated by a time period from each other.

[0093] In certain embodiments, the invention provides a method wherein the time period is at least 1 day, 2 days, 3 days, 4 days, 5 days, 6 days, 1 week, 2 weeks, 3 weeks, 1 month, 2 months, or 3 months.

[0094] In certain embodiments, the invention provides a method wherein the time period is at least 1 day, 2 days, 3 days, 4 days, 5 days, 6 days, 1 week, 2 weeks, 3 weeks, 1 month, 2 months, or 3 months.

[0095] In certain embodiments, the invention provides a method wherein the time period is at least 1 day, 2 days, 3 days, 4 days, 5 days, 6 days, 1 week, 2 weeks, 3 weeks, 1 month, 2 months, or 3 months.

[0096] In certain embodiments, the invention provides a method wherein the time period is at least 1 day, 2 days, 3 days, 4 days, 5 days, 6 days, 1 week, 2 weeks, 3 weeks, 1 month, 2 months, or 3 months.

[0097] In certain embodiments, the invention provides a method wherein the time period is at least 1 day, 2 days, 3 days, 4 days, 5 days, 6 days, 1 week, 2 weeks, 3 weeks, 1 month, 2 months, or 3 months.

[0098] In certain embodiments, the invention provides a method wherein the time period is at least 1 day, 2 days, 3 days, 4 days, 5 days, 6 days, 1 week, 2 weeks, 3 weeks, 1 month, 2 months, or 3 months.

[0099] In certain embodiments, the invention provides a method wherein one or more of said first antibodies or antigen-binding fragments thereof and/or one or more of said second antibodies or antigen-binding fragments thereof are administered by a nebulizer or an inhaler.

[0100] In certain embodiments, the invention provides a method wherein one or more of said first antibodies or antigen-binding fragments thereof and/or one or more of said second antibodies or antigen-binding fragments thereof are administered intramuscularly, intravenously or subcutaneously.

[0101] In certain embodiments, the invention provides a method wherein the viral infection is an infection with RSV and hMPV.

[0102] In certain embodiments, the invention provides a method wherein the viral infection is an infection with RSV and APV.

[0103] In certain embodiments, the invention provides a method wherein at least one of said antibodies is a monoclonal antibody, a synthetic antibody, an intrabody, a chimeric antibody, a human antibody, a humanized chimeric antibody, a humanized antibody, a glycosylated antibody, a multispecific antibody, a human antibody, a single-chain antibody, or a bispecific antibody.

[0104] In certain embodiments, the invention provides a method wherein at least one of said antibodies is a human antibody.

[0105] In certain embodiments, the invention provides a method wherein at least one of said antibodies is a humanized antibody.

[0106] In certain embodiments, the invention provides a method wherein at least one of said antibodies is a synthetic antibody.

[0107] In certain embodiments, the invention provides a method wherein the subject is a mammal.

[0108] In certain embodiments, the invention provides a method wherein the mammal is a primate.

[0109] In certain embodiments, the invention provides a method wherein the primate is a human.

[0110] In certain embodiments, the invention provides a method wherein the human is an elderly human.

[0111] In certain embodiments, the invention provides a method wherein the human is a transplant recipient.

[0112] In certain embodiments, the invention provides a method wherein the human is an immunocompromised patient.

[0113] In certain embodiments, the invention provides a method wherein the human is an AIDS patient.

[0114] In certain embodiments, the invention provides a method wherein the human is an infant.

[0115] In certain embodiments, the invention provides a method wherein the human has cystic fibrosis, bronchopulmonary dysplasia, congenital heart disease, congenital immunodeficiency, or acquired immunodeficiency or has had a bone marrow transplant.

[0116] In certain embodiments, the invention provides a method wherein the infant was born prematurely or is at risk of hospitalization for a RSV infection and/or for a hMPV infection.

[0117] In certain embodiments, the invention provides a method wherein the human infant was born prematurely.

[0118] In certain embodiments, the invention provides a method wherein the infant was born at 32 weeks of gestational age.

[0119] In certain embodiments, the invention provides a method wherein the infant was born at between 32 and 35 weeks of gestational age.

[0120] In certain embodiments, the invention provides a method wherein the infant was born at more than 35 weeks of gestational age.

[0121] In certain embodiments, the invention provides a method wherein the infant is more than 38 weeks of gestational age.

[0122] In certain embodiments, the invention provides a method wherein the mammal is not a primate.

[0123] In certain embodiments, the invention provides a method wherein the non-primate mammal is an animal model for RSV infection and/or hMPV infection.

[0124] In certain embodiments, the invention provides a method wherein the non-primate mammal is a cotton rat.

[0125] In certain embodiments, the invention provides a method wherein the antibody is administered once a month just prior to and during the RSV season.

[0126] In certain embodiments, the invention provides a method wherein the antibody is administered every two months just prior to and during the RSV season.

[0127] In certain embodiments, the invention provides a method wherein the antibody is administered once just prior to or during the RSV season.

[0128] In certain embodiments, the invention provides a method wherein at least one of said fragments is a Fab fragment, a F(ab′) fragment, a F(ab′)₂ fragment, a Fd, a single-chain Fv, a disulfide-linked Fv, a fragment comprising a V_{L} domain, or a fragment comprising a V_{H} domain.

[0129] In certain embodiments, the invention provides a method of preventing a viral infection in a subject, said method comprising administering to the subject: (i) a dose of one or more antibodies or antigen-binding fragments thereof, wherein one or more of said antibodies or antigen-binding fragments thereof (i) are human or humanized, (ii) cross-react with a turkey APV antigen, and (iii) bind immunospecifically to a hMPV antigen.

[0130] In certain embodiments, the invention provides a method of treating one or more symptoms of a respiratory viral infection in a subject, said method comprising administering to the subject: (i) a dose of one or more antibodies or antigen-binding fragments thereof, wherein one or more of said antibodies or antigen-binding fragments thereof (i) are human or humanized, (ii) cross-react with a turkey APV antigen, and (iii) bind immunospecifically to a hMPV antigen.

[0131] In certain embodiments, the invention provides a method of passive immunotherapy, said method comprising administering to a subject: (i) a dose of one or more antibodies or antigen-binding fragments thereof, wherein one or more of said antibodies or antigen-binding fragments thereof (i) are human or humanized, (ii) cross-react with a turkey APV antigen, and (iii) bind immunospecifically to a hMPV antigen, wherein the dose reduces the incidence of hMPV infection by at least 25%.

[0132] In certain embodiments, the invention provides a method wherein the dose reduces the incidence of hMPV infection by at least 50%.

[0133] In certain embodiments, the invention provides a method wherein the dose reduces the incidence of hMPV infection by at least 75%.

[0134] In certain embodiments, the invention provides a method wherein the dose reduces the incidence of hMPV infection by at least 90%.

[0135] In certain embodiments, the invention provides a method of passive immunotherapy, said method comprising administering to a subject: (i) a dose of one or more antibodies or antigen-binding fragments thereof, wherein one or more of said antibodies or antigen-binding fragments thereof (i) are human or humanized, (ii) cross-react with a turkey APV antigen, and (iii) bind immunospecifically to a hMPV antigen, wherein the serum titer of one or more of said antibodies or antigen-binding fragments thereof in the subject is at least 10 μg/ml after 15 days of administering one or more of said antibodies or antigen-binding fragments thereof.

[0136] In certain embodiments, the invention provides a pharmaceutical composition, said composition comprising: (i) one or more first antibodies or antigen-binding fragments thereof, wherein one or more of said first antibodies or antigen-binding fragments thereof bind immunospecifically to a RSV antigen; and (ii) one or more second antibodies or antigen-binding fragments thereof, wherein one or more of said second antibodies or antigen-binding fragments thereof bind immunospecifically to a hMPV antigen.

[0137] In certain embodiments, the invention provides a pharmaceutical composition wherein the amino acid sequence of the RSV antigen is that of SEQ ID NO:390 to 398, respectively.

[0138] In certain embodiments, the invention provides a pharmaceutical composition wherein the amino acid sequence of the RSV antigen is 90% identical to the amino acid sequence of RSV nucleoprotein, RSV phosphoprotein, RSV matrix protein, RSV small hydrophobic protein, RSV RNA-dependent RNA polymerase, RSV F protein, or RSV G protein.

[0139] In certain embodiments, the invention provides a pharmaceutical composition wherein the RSV antigen is selected from the group consisting of RSV nucleoprotein, RSV phosphoprotein, RSV matrix protein, RSV small hydrophobic protein, RSV RNA-dependent RNA polymerase, RSV F protein, and RSV G protein.

[0140] In certain embodiments, the invention provides a pharmaceutical composition wherein one or more of said first antibodies or antigen-binding fragments thereof immunospecifically bind to an antigen of Group A or Group B RSV.

[0141] In certain embodiments, the invention provides a pharmaceutical composition wherein the RSV antigen is RSV F protein.

[0142] In certain embodiments, the invention provides a pharmaceutical composition wherein one or more of said second antibodies cross-react with a turkey APV antigen.

[0143] In certain embodiments, the invention provides a pharmaceutical composition wherein one or more of said second antibodies are (i) human or humanized antibodies and (ii) cross-react with a turkey APV antigen.

[0144] In certain embodiments, the invention provides a pharmaceutical composition wherein said turkey APV antigen is selected from the group consisting of turkey APV nucleoprotein, turkey APV phosphoprotein, turkey APV matrix protein, turkey APV small hydrophobic protein, turkey APV RNA-dependent RNA polymerase, turkey APV F protein, and turkey APV G. protein.

[0145] In certain embodiments, the invention provides a pharmaceutical composition wherein said turkey APV antigen is an antigen of avian pneumovirus type A, avian pneumovirus type B, or avian pneumovirus type C.

[0146] In certain embodiments, the invention provides In certain embodiments, the invention provides a pharmaceutical composition wherein the amino acid sequence of said turkey APV antigen is that of SEQ ID NO:424 to 429, respectively.

[0147] In certain embodiments, the invention provides a pharmaceutical composition wherein the amino acid sequence of the hMPV antigen is that of SEQ ID NO: 399-406, 420, or 421, respectively.

[0148] In certain embodiments, the invention provides a pharmaceutical composition wherein the hMPV antigen is selected from the group consisting of hMPV nucleoprotein, hMPV phosphoprotein, hMPV matrix protein, hMPV small hydrophobic protein, hMPV RNA-dependent RNA polymerase, hMPV F protein, and hMPV G protein.

[0149] In certain embodiments, the invention provides a pharmaceutical composition wherein the hMPV antigen is hMPV F protein.

[0150] In certain embodiments, the invention provides a pharmaceutical composition wherein the first antibody is Palivizumab; AFFF; P12f2 P12f4; P11d4; Ale9; A12a6; A13c4; A17d4; A4B4; 1X-493 μl; FR H3-3F4; M3H9; Y10H6; DG; AFFF(1); 6H8; L1-7E5; L2-15B10; A13a11; A1h5; A4B4(1);A4B4-F52S; or A4B4L1FR-S28R.

[0151] In certain embodiments, the invention provides a pharmaceutical composition wherein at least one of said antibodies is a monoclonal antibody, a synthetic antibody, an intrabody, a chimeric antibody, a human antibody, a humanized chimeric antibody, a humanized antibody, a glycosylated antibody, a multispecific antibody, a human antibody, a single-chain antibody, or a bispecific antibody.

[0152] In certain embodiments, the invention provides a pharmaceutical composition wherein at least one of said antibodies is a human antibody.

[0153] In certain embodiments, the invention provides a pharmaceutical composition wherein at least one of said antibodies is a humanized antibody.

[0154] In certain embodiments, the invention provides a pharmaceutical composition wherein at least one of said antibodies is a synthetic antibody.

[0155] In certain embodiments, the invention provides a pharmaceutical composition wherein at least one of said fragments is a Fab fragment, a F(ab′) fragment, a F(ab′)₂ fragment, a Fd, a single-chain Fv, a disulfide-linked Fv, a fragment comprising a V_{L} domain, or a fragment comprising a V_{H} domain.

[0156] In certain embodiments, the invention provides a pharmaceutical composition, said composition comprising: one or more antibodies or antigen-binding fragments thereof, wherein one or more of said antibodies or antigen-binding fragments thereof (i) are human or humanized, (ii) cross-react with a turkey APV antigen, and (iii) bind immunospecifically to a hMPV antigen.

[0157] In certain embodiments, the invention provides a method of preventing a viral infection in a subject, said method comprising administering to the subject: (i) a prophylactically effective amount of one or more first antibodies or antigen-binding fragments thereof, wherein one or more of said first antibodies or antigen-binding fragments thereof bind immunospecifically to a PIV antigen; and (ii) a prophylactically effective amount of one or more second antibodies or antigen-binding fragments thereof, wherein one or more of said second antibodies or antigen-binding fragments thereof bind immunospecifically to a hMPV antigen.

[0158] In certain embodiments, the invention provides a method wherein one or more of said first antibodies or antigen-binding fragments thereof neutralize PIV.

[0159] In certain embodiments, the invention provides a method wherein one or more of said second antibodies or antigen-binding fragments thereof neutralize hMPV.

[0160] In certain embodiments, the invention provides a method wherein one or more of said first antibodies or antigen-binding fragments thereof block PIV infection of cells of the subject.

[0161] In certain embodiments, the invention provides a method wherein one or more of said second antibodies or antigen-binding fragments thereof block hMPV infection of cells of the subject.

[0162] In certain embodiments, the invention provides a method of treating one or more symptoms of a respiratory viral infection in a subject, said method comprising administering to the subject: (i) a therapeutically effective amount of one or more first antibodies or antigen-binding fragments thereof, wherein one or more of said first antibodies or antigen-binding fragments thereof bind immunospecifically to a PIV antigen; and (ii) a therapeutically effective amount of one or more second antibodies or antigen-binding fragments thereof, wherein one or more of said second antibodies or antigen-binding fragments thereof bind immunospecifically to a hMPV antigen.

[0163] In certain embodiments, the invention provides a method of passive immunotherapy, said method comprising administering to a subject: (i) a first dose of one or more first antibodies or antigen-binding fragments thereof, wherein one or more of said first antibodies or a fragments thereof bind immunospecifically to a PIV antigen; and (ii) a second dose of one or more second antibodies or antigen-binding fragments thereof, wherein one or more of said second antibodies or a fragments thereof bind immunospecifically to a hMPV antigen, wherein the first dose reduces the incidence of PIV infection by at least 25% and wherein the second dose reduces the incidence of hMPV infection by at least 25%.

[0164] In certain embodiments, the invention provides a method wherein the first dose reduces the incidence of PIV infection by at least 50% and wherein the second dose reduces the incidence of hMPV infection by at least 50%.

[0165] In certain embodiments, the invention provides a method wherein the first dose reduces the incidence of PIV infection by at least 75% and wherein the second dose reduces the incidence of hMPV infection by at least 75%.

[0166] In certain embodiments, the invention provides a method wherein the first dose reduces the incidence of PIV infection by at least 90% and wherein the second dose reduces the incidence of hMPV infection by at least 90%.

[0167] In certain embodiments, the invention provides a method of passive immunotherapy, said method comprising administering to a subject: (i) a first dose of one or more first antibodies or antigen-binding fragments thereof, wherein one or more of said first antibodies or antigen-binding fragments thereof bind immunospecifically to a PIV antigen; and (ii) a second dose of one or more second antibodies or antigen-binding fragments thereof, wherein one or more of said second antibodies or antigen-binding fragments thereof bind immunospecifically to a hMPV antigen, wherein the serum titer of one or more of said first antibodies or antigen-binding fragments thereof in the subject is at least 10 μg/ml after 15 days of administering one or more of said first antibodies or antigen-binding fragments thereof and wherein the serum titer of one or more of said second antibodies or antigen-binding fragments thereof in the subject is at least 10 μg/ml after 15 days of administering one or more of said second antibodies or antigen-binding fragments thereof.

[0168] In certain embodiments, the invention provides a method wherein the amino acid sequence of the PIV antigen is that of SEQ ID NO:407 to 419, respectively.

[0169] In certain embodiments, the invention provides a method wherein the amino acid sequence of the PIV antigen is 90% identical to the amino acid sequence of PIV nucleocapsid phosphoprotein, PIV L protein, PIV matrix protein, PIV HN glycoprotein, PIV RNA-dependent RNA polymerase, PIV Y1 protein, PIV D protein, or PIV C protein.

[0170] In certain embodiments, the invention provides a method wherein the PIV antigen is selected from the group consisting of PIV nucleocapsid phosphoprotein, PIV L protein, PIV matrix protein, PIV HN glycoprotein, PUV RNA-dependent RNA polymerase, PIV Y1 protein, PIV D protein, or PIV C protein.

[0171] In certain embodiments, the invention provides a method wherein one or more of said first antibodies immunospecifically bind to an antigen of human PIV type 1, human PIV type 2, human PIV type 3, or human PIV type 4.

[0172] In certain embodiments, the invention provides a method wherein the PIV antigen is PIV F protein.

[0173] In certain embodiments, the invention provides a method wherein one or more of said second antibodies cross-react with a turkey APV antigen.

[0174] In certain embodiments, the invention provides a method wherein one or more of said second antibodies are (i) human or humanized antibodies and (ii) cross-react with a turkey APV antigen.

[0175] In certain embodiments, the invention provides a method wherein said turkey APV antigen is selected from the group consisting of turkey APV nucleoprotein, turkey APV phosphoprotein, turkey APV matrix protein, turkey APV small hydrophobic protein, turkey APV RNA-dependent RNA polymerase, turkey APV F protein, and turkey APV G protein.

[0176] In certain embodiments, the invention provides a method wherein said turkey APV antigen is an antigen of avian pneumovirus type A, avian pneumovirus type B, or avian pneumovirus type C.

[0177] In certain embodiments, the invention provides a method wherein the amino acid sequence of said turkey APV antigen is that of SEQ ID NO:424 to 429, respectively.

[0178] In certain embodiments, the invention provides a method wherein the amino acid sequence of the hMPV antigen is that of SEQ ID NO: 399-406, 420, or 421, respectively.

[0179] In certain embodiments, the invention provides a method wherein the hMPV antigen is selected from the group consisting of hMPV nucleoprotein, hMPV phosphoprotein, hMPV matrix protein, hMPV small hydrophobic protein, hMPV RNA-dependent RNA polymerase, hMPV F protein, and hMPV G protein.

[0180] In certain embodiments, the invention provides a method wherein the hMPV antigen is hMPV F protein.

[0181] In certain embodiments, the invention provides a method wherein the effective amount of one or more of said first antibodies is 100 mg/kg or less.

[0182] In certain embodiments, the invention provides a method wherein the effective amount of one or more of said first antibodies is 10 mg/kg or less.

[0183] In certain embodiments, the invention provides a method wherein the effective amount of one or more of said first antibodies is 1 mg/kg or less.

[0184] In certain embodiments, the invention provides a method wherein the effective amount of one or more of said second antibodies or antigen-binding fragments thereof is 100 mg/kg or less.

[0185] In certain embodiments, the invention provides a method wherein the effective amount of one or more of said second antibodies or antigen-binding fragments thereof is 10 mg/kg or less.

[0186] In certain embodiments, the invention provides a method wherein the effective amount of one or more of said second antibodies or antigen-binding fragments thereof is 1 mg/kg or less.

[0187] In certain embodiments, the invention provides a method wherein one or more of said first antibodies or antigen-binding fragments thereof are administered at a time period prior to administering of one or more of said second antibodies or antigen-binding fragments thereof.

[0188] In certain embodiments, the invention provides a method wherein one or more of said second antibodies or antigen-binding fragments thereof are administered at a time period prior to administering of one or more of said first antibodies or antigen-binding fragments thereof.

[0189] In certain embodiments, the invention provides a method wherein one or more of said first antibodies or antigen-binding fragments thereof and one or more of said second antibodies or antigen-binding fragments thereof are administered concurrently.

[0190] In certain embodiments, the invention provides a method wherein one or more of said first antibodies or antigen-binding fragments thereof are administered in a sequence of two or more administrations, wherein the administrations of one or more of said first antibodies or antigen-binding fragments thereof are separated by a time period from each other, and wherein one or more of said second antibodies or antigen-binding fragments thereof are administered before, during, or after the sequence.

[0191] In certain embodiments, the invention provides a method wherein one or more of said first antibodies or antigen-binding fragments thereof are administered in a sequence of two or more administrations, wherein the administrations of one or more of said second antibodies or antigen-binding fragments thereof are separated by a time period from each other, and wherein one or more of said first antibodies or antigen-binding fragments thereof are administered before, during, or after the sequence.

[0192] In certain embodiments, the invention provides a method wherein one or more of said first antibodies or antigen-binding fragments thereof and one or more of said second antibodies or antigen-binding fragments thereof are administered in a sequence of two or more administrations, wherein the administrations are separated by a time period from each other.

[0193] In certain embodiments, the invention provides a method wherein the time period is at least 1 day, 2 days, 3 days, 4 days, 5 days, 6 days, 1 week, 2 weeks, 3 weeks, 1 month, 2 months, or 3 months.

[0194] In certain embodiments, the invention provides a method wherein the time period is at least 1 day, 2 days, 3 days, 4 days, 5 days, 6 days, 1 week, 2 weeks, 3 weeks, 1 month, 2 months, or 3 months.

[0195] In certain embodiments, the invention provides a method wherein the time period is at least 1 day, 2 days, 3 days, 4 days, 5 days, 6 days, 1 week, 2 weeks, 3 weeks, 1 month, 2 months, or 3 months.

[0196] In certain embodiments, the invention provides a method wherein the time period is at least 1 day, 2 days, 3 days, 4 days, 5 days, 6 days, 1 week, 2 weeks, 3 weeks, 1 month, 2 months, or 3 months.

[0197] In certain embodiments, the invention provides a method wherein the time period is at least 1 day, 2 days, 3 days, 4 days, 5 days, 6 days, 1 week, 2 weeks, 3 weeks, 1 month, 2 months, or 3 months.

[0198] In certain embodiments, the invention provides a method wherein one or more of said first antibodies or antigen-binding fragments thereof and/or one or more of said second antibodies or antigen-binding fragments thereof are administered by a nebulizer or an inhaler.

[0199] In certain embodiments, the invention provides a method wherein one or more of said first antibodies or antigen-binding fragments thereof and/or one or more of said second antibodies or antigen-binding fragments thereof are administered intramuscularly, intravenously or subcutaneously.

[0200] In certain embodiments, the invention provides a method wherein the viral infection is an infection with PIV and hMPV.

[0201] In certain embodiments, the invention provides a method wherein the viral infection is an infection with PIV and APV.

[0202] In certain embodiments, the invention provides a method wherein at least one of said antibodies is a monoclonal antibody, a synthetic antibody, an intrabody, a chimeric antibody, a human antibody, a humanized chimeric antibody, a humanized antibody, a glycosylated antibody, a multispecific antibody, a human antibody, a single-chain antibody, or a bispecific antibody.

[0203] In certain embodiments, the invention provides a method wherein at least one of said antibodies is a human antibody.

[0204] In certain embodiments, the invention provides a method wherein at least one of said antibodies is a humanized antibody.

[0205] In certain embodiments, the invention provides a method wherein at least one of said antibodies is a synthetic antibody.

[0206] In certain embodiments, the invention provides a method wherein the subject is a mammal.

[0207] In certain embodiments, the invention provides a method wherein the mammal is a primate.

[0208] In certain embodiments, the invention provides a method wherein the primate is a human.

[0209] In certain embodiments, the invention provides a method wherein the human is an elderly human.

[0210] In certain embodiments, the invention provides a method wherein the human is a transplant recipient.

[0211] In certain embodiments, the invention provides a method wherein the human is an immunocompromised patient.

[0212] In certain embodiments, the invention provides a method wherein the human is an AIDS patient.

[0213] In certain embodiments, the invention provides a method wherein the human is an infant.

[0214] In certain embodiments, the invention provides a method wherein the human has cystic fibrosis, bronchopulmonary dysplasia, congenital heart disease, congenital immunodeficiency, or acquired immunodeficiency or has had a bone marrow transplant.

[0215] In certain embodiments, the invention provides a method wherein the infant was born prematurely or is at risk of hospitalization for a PIV infection and/or a hMPV infection.

[0216] In certain embodiments, the invention provides a method wherein the infant was born prematurely.

[0217] In certain embodiments, the invention provides a method wherein the infant was born at less than 32 weeks of gestational age.

[0218] In certain embodiments, the invention provides a method wherein the infant was born at 32 and 35 weeks of gestational age.

[0219] In certain embodiments, the invention provides a method wherein the infant was born at 35 weeks of gestational age.

[0220] In certain embodiments, the invention provides a method wherein the infant is more than 38 weeks of gestational age.

[0221] In certain embodiments, the invention provides a method wherein the mammal is not a primate.

[0222] In certain embodiments, the invention provides a method wherein the non-primate mammal is an animal model for PIV infection and/or hMPV infection.

[0223] In certain embodiments, the invention provides a method wherein the non-primate mammal is a cotton rat.

[0224] In certain embodiments, the invention provides a method wherein the antibody is administered once a month just prior to and during the PIV season.

[0225] In certain embodiments, the invention provides a method wherein the antibody is administered every two months just prior to and during the PIV season.

[0226] In certain embodiments, the invention provides a method wherein the antibody is administered once just prior to or during the PIV season.

[0227] In certain embodiments, the invention provides a method wherein at least one of said fragments is a Fab fragment, a F(ab′) fragment, a F(ab′)₂ fragment, a Fd, a single-chain Fv, a disulfide-linked Fv, a fragment comprising a VL domain, or a fragment comprising a VH domain.

[0228] In certain embodiments, the invention provides a method of preventing a viral infection in a subject, said method comprising administering to the subject: (i) a prophylactically effective amount of one or more first antibodies or antigen-binding fragments thereof, wherein one or more of said first antibodies or antigen-binding fragments thereof bind immunospecifically to a RSV antigen; (ii) a prophylactically effective amount of one or more second antibodies or antigen-binding fragments thereof, wherein one or more of said second antibodies or antigen-binding fragments thereof bind immunospecifically to a hMPV antigen; and (iii) a prophylactically effective amount of one or more third antibodies or antigen-binding fragments thereof, wherein one or more of said third antibodies or antigen-binding fragments thereof bind immunospecifically to a PUV antigen.

[0229] In certain embodiments, the invention provides a method wherein one or more of said first antibodies or antigen-binding fragments thereof neutralize RSV.

[0230] In certain embodiments, the invention provides a method wherein one or more of said second antibodies or antigen-binding fragments thereof neutralize hMPV.

[0231] In certain embodiments, the invention provides a method wherein one or more of said third antibodies or antigen-binding fragments thereof neutralize PIV.

[0232] In certain embodiments, the invention provides a method wherein one or more of said first antibodies or antigen-binding fragments thereof block RSV infection of cells of the subject.

[0233] In certain embodiments, the invention provides a method wherein one or more of said second antibodies or antigen-binding fragments thereof block hMPV infection of cells of the subject.

[0234] In certain embodiments, the invention provides a method wherein one or more of said third antibodies or antigen-binding fragments thereof block PIV infection of cells of the subject.

[0235] In certain embodiments, the invention provides a method of treating one or more symptoms of a respiratory viral infection in a subject, said method comprising administering to the subject: (i) a therapeutically effective amount of one or more first antibodies or antigen-binding fragments thereof, wherein one or more of said first antibodies or antigen-binding fragments thereof bind immunospecifically to a RSV antigen; (ii) a therapeutically effective amount of one or more second antibodies or antigen-binding fragments thereof, wherein one or more of said second antibodies or antigen-binding fragments thereof bind immunospecifically to a hMPV antigen; and (iii) a therapeutically effective amount of one or more third antibodies or antigen-binding fragments thereof, wherein one or more of said third antibodies or antigen-binding fragments thereof bind immunospecifically to a PIV antigen.

[0236] In certain embodiments, the invention provides a method of passive immunotherapy, said method comprising administering to a subject: (i) a first dose of one or more first antibodies or antigen-binding fragments thereof, wherein one or more of said first antibodies or a fragments thereof bind immunospecifically to a RSV antigen; (ii) a second dose of one or more second antibodies or antigen-binding fragments thereof, wherein one or more of said second antibodies or a fragments thereof bind immunospecifically to a hMPV antigen; and (iii) a third dose of one or more third antibodies or antigen-binding fragments thereof, wherein one or more of said third antibodies or antigen-binding fragments thereof bind immunospecifically to a PIV antigen wherein the first dose reduces the incidence of RSV infection by at least 25%, wherein the second dose reduces the incidence of hMPV infection by at least 25%, and wherein the third dose reduces the incidence of PIV infection by at least 25%.

[0237] In certain embodiments, the invention provides a method wherein the first dose reduces the incidence of RSV infection by at least 50%, wherein the second dose reduces the incidence of hMPV infection by at least 50%, and wherein the third dose reduces the incidence of PIV infection by at least 50%.

[0238] In certain embodiments, the invention provides a method wherein the first dose reduces the incidence of RSV infection by at least 75%, wherein the second dose reduces the incidence of hMPV infection by at least 75%, and wherein the third dose reduces the incidence of PIV infection by at least 75%.

[0239] In certain embodiments, the invention provides a method wherein the first dose reduces the incidence of RSV infection by at least 90%, wherein the second dose reduces the incidence of hMPV infection by at least 90%, and wherein the third antibody reduces the incidence of PIV infection by at least 90%.

[0240] In certain embodiments, the invention provides a method of passive immunotherapy, said method comprising administering to a subject: (i) a first dose of one or more first antibodies or antigen-binding fragments thereof, wherein one or more of said first antibodies or antigen-binding fragments thereof bind immunospecifically to a RSV antigen; (ii) a second dose of one or more second antibodies or antigen-binding fragments thereof, wherein one or more of said second antibodies or antigen-binding fragments thereof bind immunospecifically to a hMPV antigen; and (iii) a third dose of one or more third antibodies or antigen-binding fragments thereof, wherein one or more of said third antibodies or antigen-binding fragments thereof bind immunospecifically to a PIV antigen, wherein the serum titer of one or more of said first antibodies or antigen-binding fragments thereof in the subject is at least 10 μg/ml after 15 days of administering one or more of said first antibodies or antigen-binding fragments thereof, wherein the serum titer of one or more of said second antibodies or antigen-binding fragments thereof in the subject is at least 10 μg/ml after 15 days of administering one or more of said second antibodies or antigen-binding fragments thereof, and wherein the serum titer of one or more of said third antibodies or antigen-binding fragments thereof in the subject is at least 10 μg/ml after 15 days of administering one or more of said third antibodies or antigen-binding fragments thereof.

[0241] In certain embodiments, the invention provides a method wherein the amino acid sequence of the PIV antigen is that of SEQ ID NO:407 to 419, respectively.

[0242] In certain embodiments, the invention provides a method wherein the amino acid sequence of the PIV antigen is 90% identical to the amino acid sequence of PIV nucleoprotein, PIV phosphoprotein, PIV matrix protein, PIV small hydrophobic protein, PIV RNA-dependent RNA polymerase, PIV F protein, or PIV G protein.

[0243] In certain embodiments, the invention provides a method wherein the PIV antigen is selected from the group consisting of PIV nucleoprotein, PIV phosphoprotein, PIV matrix protein, PIV small hydrophobic protein, PIV RNA-dependent RNA polymerase, PIV F protein, and PIV G protein.

[0244] In certain embodiments, the invention provides a method of preventing a viral infection in a subject, said method comprising administering to the subject: (i) a prophylactically effective amount of one or more first antibodies or antigen-binding fragments thereof, wherein one or more of said first antibodies or antigen-binding fragments thereof bind immunospecifically to a RSV antigen; and (ii) a prophylactically effective amount of one or more second antibodies or antigen-binding fragments thereof, wherein one or more of said second antibodies or antigen-binding fragments thereof bind immunospecifically to a PIV antigen.

[0245] In certain embodiments, the invention provides a method wherein one or more of said first antibodies or antigen-binding fragments thereof neutralize RSV.

[0246] In certain embodiments, the invention provides a method wherein one or more of said second antibodies or antigen-binding fragments thereof neutralize PIV.

[0247] In certain embodiments, the invention provides a method wherein one or more of said first antibodies or antigen-binding fragments thereof block RSV infection of cells of the subject.

[0248] In certain embodiments, the invention provides a method wherein one or more of said second antibodies or antigen-binding fragments thereof block PIV infection of cells of the subject.

[0249] In certain embodiments, the invention provides a method of treating one or more symptoms of a respiratory viral infection in a subject, said method comprising administering to the subject: (i) a therapeutically effective amount of one or more first antibodies or antigen-binding fragments thereof, wherein one or more of said first antibodies or antigen-binding fragments thereof bind immunospecifically to a RSV antigen; and (ii) a therapeutically effective amount of one or more second antibodies or antigen-binding fragments thereof, wherein one or more of said second antibodies or antigen-binding fragments thereof bind immunospecifically to a PIV antigen.

[0250] In certain embodiments, the invention provides a method of passive immunotherapy, said method comprising administering to a subject: (i) a first dose of one or more first antibodies or antigen-binding fragments thereof, wherein one or more of said first antibodies or a fragments thereof bind immunospecifically to a RSV antigen; and (ii) a second dose of one or more second antibodies or antigen-binding fragments thereof, wherein one or more of said second antibodies or a fragments thereof bind immunospecifically to a PIV antigen, wherein the first dose reduces the incidence of RSV infection by at least 25% and wherein the second dose reduces the incidence of PIV infection by at least 25%.

[0251] In certain embodiments, the invention provides a method wherein the first dose reduces the incidence of RSV infection by at least 50% and wherein the second dose reduces the incidence of hMPV infection by at least 50%.

[0252] In certain embodiments, the invention provides a method wherein the first dose reduces the incidence of RSV infection by at least 75% and wherein the second dose reduces the incidence of hMPV infection by at least 75%.

[0253] In certain embodiments, the invention provides a method wherein the first dose reduces the incidence of RSV infection by at least 90% and wherein the second dose reduces the incidence of hMPV infection by at least 90%.

[0254] In certain embodiments, the invention provides a method of passive immunotherapy, said method comprising administering to a subject: (i) a first dose of one or more first antibodies or antigen-binding fragments thereof, wherein one or more of said first antibodies or antigen-binding fragments thereof bind immunospecifically to a RSV antigen; and (ii) a second dose of one or more second antibodies or antigen-binding fragments thereof, wherein one or more of said second antibodies or antigen-binding fragments thereof bind immunospecifically to a PIV antigen, wherein the serum titer of one or more of said first antibodies or antigen-binding fragments thereof in the subject is at least 10 μg/ml after 15 days of administering one or more of said first antibodies or antigen-binding fragments thereof and wherein the serum titer of one or more of said second antibodies or antigen-binding fragments thereof in the subject is at least 10 μg/ml after 15 days of administering one or more of said second antibodies or antigen-binding fragments thereof.

### 3.2. BRIEF DESCRIPTION OF THE FIGURES

[0255] FIG. 1. Expression constructs for the expression of the hMPV F protein.

[0256] 3.3. Definitions

[0257] The term “analog” of a certain polypeptide as used herein refers to a polypeptide that possesses a similar or identical function as the certain polypeptide or a fragment of the certain polypeptide, the certain polypeptide can be, e.g., an antibody or an antigen-binding fragment thereof, but does not necessarily comprise a similar or identical amino acid sequence to the certain polypeptide or fragment thereof, or possess a similar or identical structure to the certain polypeptide.

[0258] A polypeptide that has a similar amino acid sequence to a certain polypeptide refers to a polypeptide that satisfies at least one of the following: (a) a polypeptide having an amino acid sequence that is at least 30%, at least 35%, at least 40%, at least 45%, at least 50%, at least 55%, at least 60%, at least 65%, at least 70%, at least 75%, at least 80%, at least 85%, at least 90%, at least 95% or at least 99% identical to the amino acid sequence the certain polypeptide; (b) a polypeptide encoded by a nucleotide sequence that hybridizes under stringent conditions to a nucleotide sequence encoding the certain polypeptide of at least 5 amino acid residues, at least 10 amino acid residues, at least 15 amino acid residues, at least 20 amino acid residues, at least 25 amino acid residues, at least 40 amino acid residues, at least 50 amino acid residues, at least 60 amino residues, at least 70 amino acid residues, at least 80 amino acid residues, at least 90 amino acid residues, at least 100 amino acid residues, at least 125 amino acid residues, or at least 150 amino acid residues; and (c) a polypeptide encoded by a nucleotide sequence that is at least 30%, at least 35%, at least 40%, at least 45%, at least 50%, at least 55%, at least 60%, at least 65%, at least 70%, at least 75%, at least 80%, at least 85%, at least 90%, at least 95% or at least 99% identical to the nucleotide sequence encoding the certain polypeptide. A polypeptide with similar structure to a certain polypeptide refers to a polypeptide that has a similar secondary, tertiary or quaternary structure to a certain polypeptide. The structure of a polypeptide can be determined by methods known to those skilled in the art, including but not limited to, X-ray crystallography, nuclear magnetic resonance, and crystallographic electron microscopy. A certain polypeptide in the context of the present invention can be RSV polypeptide, an APV polypeptide, a hMPV polypeptide, a PIV polypeptide, a fragment of a RSV polypeptide, a fragment of an APV polypeptide, a fragment of a hMPV polypeptide, a fragment of a PIV polypeptide, an antibody that immunospecifically binds to a RSV polypeptide, an antibody that immunospecifically binds to an APV polypeptide, an antibody that immunospecifically binds to a PIV polypeptide, an antibody that immunospecifically binds to a hMPV polypeptide, an antibody fragment that immunospecifically binds to a RSV polypeptide, an antibody fragment that immunospecifically binds to an APV polypeptide, an antibody fragment that immunospecifically binds to a PIV polypeptide, or an antibody fragment that immunospecifically binds to a hMPV polypeptide.

[0259] As used herein, the terms “antibody” and “antibodies” refer to monoclonal antibodies, multispecific antibodies (e.g., bi-specific), human antibodies, humanized antibodies, camelised antibodies, chimeric antibodies, single-chain Fvs (scFv), single chain antibodies, synthetic antibodies, single domain antibodies, Fab fragments, F(ab) fragments, disulfide-linked Fvs (sdFv), and anti-idiotypic (anti-Id) antibodies, and epitope-binding fragments of any of the above. In particular, antibodies include immunoglobulin molecules and immunologically active fragments of immunoglobulin molecules, i.e., molecules that contain an antigen binding site. Immunoglobulin molecules can be of any type (e.g., IgG, IgE, IgM, IgD, IgA and IgY), class (e.g., IgG₁, IgG₂, IgG₃, IgG₄, IgA₁ and IgA₂) or subclass.

[0260] As used herein, the term “in combination” refers to the use of more than one prophylactic and/or therapeutic agents. The use of the term “in combination” does not restrict the order in which prophylactic and/or therapeutic agents are administered to a subject with a respiratory viral infection. A first prophylactic or therapeutic agent can be administered prior to (e.g., 5 minutes, 15 minutes, 30 minutes, 45 minutes, 1 hour, 2 hours, 4 hours, 6 hours, 12 hours, 24 hours, 48 hours, 72 hours, 96 hours, 1 week, 2 weeks, 3 weeks, 4 weeks, 5 weeks, 6 weeks, 8 weeks, or 12 weeks before), concomitantly with, or subsequent to (e.g., 5 minutes, 15 minutes, 30 minutes, 45 minutes, 1 hour, 2 hours, 4 hours, 6 hours, 12 hours, 24 hours, 48 hours, 72 hours, 96 hours, 1 week, 2 weeks, 3 weeks, 4 weeks, 5 weeks, 6 weeks, 8 weeks, or 12 weeks after) the administration of a second prophylactic or therapeutic agent to a subject which was or is susceptible to a respiratory viral infection. Any additional prophylactic or therapeutic agent can be administered in any order with the other additional prophylactic or therapeutic agents.

[0261] As used herein, the term “synergistic” refers to a combination of prophylactic or therapeutic agents which is more effective than the additive effects of any two or more single agents. A synergistic effect of a combination of prophylactic or therapeutic agents permits the use of lower dosages of one or more of the agents and/or less frequent administration of said agents to a subject with a respiratory viral infection. The ability to utilize lower dosages of prophylactic or therapeutic agents and/or to administer said agents less frequently reduces the toxicity associated with the administration of said agents to a subjectd without reducing the efficacy of said agents in the prevention or treatment of respiratory viral infections. In addition, a synergistic effect can result in improved efficacy of agents in the prevention or treatment of respiratory viral infections. Finally, synergistic effect of a combination of prophylactic or therapeutic agents may avoid or reduce adverse or unwanted side effects associated with the use of any single therapy.

[0262] The term “derivative” as used herein refers to a polypeptide that has been altered by the introduction of amino acid residue substitutions, deletions or additions. The term “derivative” refers also to a polypeptide that has been modified, i.e, by the covalent attachment of any type of molecule to the polypeptide. Further modifications are, inter alia, glycosylation, acetylation, pegylation, phosphorylation, amidation, derivatization by known protecting/blocking groups, proteolytic cleavage, linkage to a cellular ligand or other protein. Modifications include, inter alia, chemical modifications by techniques known to those of skill in the art, e.g., chemical cleavage, acetylation, formylation, synthesis in the presence of tunicamycin, etc. Further, a derivative if a certain polypeptide can be generated by introducing one or more non-classical amino acids into the certain polypeptide. A polypeptide derivative possesses a similar or identical function as the certain polypeptide from which it is derived.

[0263] The term “effective neutralizing titer” as used herein refers to the amount of antibody which corresponds to the amount present in the serum of animals (human or cotton rat) that has been shown to be either clinically efficacious (in humans) or to reduce virus by 99% in, for example, cotton rats. The 99% reduction is defined by a specific challenge of, e.g., 10³ pfu, 10⁴ pfu, 10⁵ pfu, 10⁶ pfu, 10⁷ pfu, 10⁸ pfu, or 10⁹ pfu of RSV, PIV, and/or hMPV.

[0264] The term “epitopes” as used herein refers to a portion of a protein or polypeptide having antigenic and/or immunogenic activity in an animal, preferably a mammal, and most preferably in a human. An epitope having immunogenic activity is a portion of a protein or polypeptide that elicits an antibody response in an animal. An epitope having antigenic activity is a portion of a protein or polypeptide to which an antibody immunospecifically binds as determined by any method well known in the art, for example, by the immunoassays described herein. Antigenic epitopes need not necessarily be immunogenic.

[0265] The term “fragment” as used herein refers to a peptide or polypeptide comprising an amino acid sequence of at least 5 contiguous amino acid residues, at least 10 contiguous amino acid residues, at least 15 contiguous amino acid residues, at least 20 contiguous amino acid residues, at least 25 contiguous amino acid residues, at least 40 contiguous amino acid residues, at least 50 contiguous amino acid residues, at least 60 contiguous amino residues, at least 70 contiguous amino acid residues, at least contiguous 80 amino acid residues, at least contiguous 90 amino acid residues, at least contiguous 100 amino acid residues, at least contiguous 125 amino acid residues, at least 150 contiguous amino acid residues, at least contiguous 175 amino acid residues, at least contiguous 200 amino acid residues, or at least contiguous 250 amino acid residues of the amino acid sequence of a polypeptide, protein, or antibody. Preferably, a fragment has the reactive activity of the polypeptide, protein, or antibody.

[0266] The term “human infant” as used herein refers to a human less than 24 months, preferably less than 16 months, less than 12 months, less than 6 months, less than 3 months, less than 2 months, or less than 1 month of age. In certain embodiments, the human infant is born at more than 38 weeks of gestational age.

[0267] The term “human infant born prematurely” as used herein refers to a human born at less than 40 weeks gestational age, less than 35 weeks gestational age. In specific embodiments, the prematurely born human infant is of between 30-35 weeks of gestational age. In specific embodiments, the prematurely born human infant is of between 35-38 weeks of gestational age. In certain embodiments, the prematurely born infant is of 38 weeks gestational age, preferably, the infant is of less than 38 weeks gestational age.

[0268] An “isolated” or “purified” antibody or fragment thereof is substantially free of cellular material or other contaminating proteins from the cell or tissue source from which the protein is derived, or substantially free of chemical precursors or other chemicals when chemically synthesized. The language “substantially free of cellular material” includes preparations of an antibody or antibody fragment in which the antibody or antibody fragment is separated from cellular components of the cells from which it is isolated or recombinantly produced. Thus, an antibody or antibody fragment that is substantially free of cellular material includes preparations of antibody or antibody fragment having less than about 30%, 20%, 10%, or 5% (by dry weight) of heterologous protein (also referred to herein as a “contaminating protein”). When the antibody or antibody fragment is recombinantly produced, it is also preferably substantially free of culture medium, i.e., culture medium represents less than about 20%, 10%, or 5% of the volume of the protein preparation. When the antibody or antibody fragment is produced by chemical synthesis, it is preferably substantially free of chemical precursors or other chemicals, i.e., it is separated from chemical precursors or other chemicals which are involved in the synthesis of the protein. Accordingly such preparations of the antibody or antibody fragment have less than about 30%, 20%, 10%, 5% (by dry weight) of chemical precursors or compounds other than the antibody or antibody fragment of interest. In a preferred embodiment, antibodies of the invention or fragments thereof are isolated or purified.

[0269] An “isolated” nucleic acid molecule is one which is separated from other nucleic acid molecules which are present in the natural source of the nucleic acid molecule. Moreover, an “isolated” nucleic acid molecule, such as a cDNA molecule, can be substantially free of other cellular material, or culture medium when produced by recombinant techniques, or substantially free of chemical precursors or other chemicals when chemically synthesized. In a preferred embodiment, nucleic acid molecules encoding antibodies of the invention or fragments thereof are isolated or purified.

[0270] The term “fusion protein” as used herein refers to a polypeptide that comprises an amino acid sequence of an antibody or fragment thereof and an amino acid sequence of a heterologous polypeptide (e.g., a non-anti-RSV antibody, a non-anti-PIV antibody, a non-anti-APV antibody and/or a non-anti-hMPV antibody).

[0271] The term “high potency” as used herein refers to antibodies or antigen-binding fragments thereof that exhibit high potency as determined in various assays for biological activity (e.g., neutralization of RSV, APV, hMPV, PIV) such as those described herein. For example, high potency antibodies of the present invention or fragments thereof have an EC₅₀ value less than 0.01 nM, less than 0.025 nM, less than 0.05 nM, less than 0.1 nM, less than 0.25 nM, less than 0.5 nM, less than 0.75 nM, less than 1 nM, less than 1.25 nM, less than 1.5 nM, less than 1.75 nM, or less than 2 nM as measured by a microneutralization assay described herein. Further, high potency antibodies of the present invention or fragments thereof result in at least a 30%, 40%, 50%, 60%, 75%, preferably at least a 95% and more preferably a 99% lower RSV titer, PIV titer, APV titer, and/or hMPV titer in a subject, such as a cotton rat 5 days after challenge with 105 pfu relative to a subject, such as a cotton rat, not administered with said antibodies or antibody fragments. In certain embodiments of the invention, high potency antibodies of the present invention or fragments thereof exhibit a high affinity and/or high avidity for one or more RSV antigens, one or more PIV antigens, one or more hMPV antigens, and/or one or more APV antigens (e.g., antibodies or antibody fragments having an affinity of at least 2×10⁸ M⁻¹, at least 2.5×10⁸ M⁻¹, at least 5×10⁸ M⁻¹, at least 10⁹ M⁻¹, at least 5×10⁹ M⁻¹, at least 10¹⁰ M⁻¹, at least 5×10¹⁰ M⁻¹, at least 10¹¹ M⁻¹, at least 5×10¹¹ M⁻¹, at least 10¹² M⁻¹, or at least 5×10¹² M⁻¹ for one or more RSV antigens, one or more PIV antigens, one or more hMPV antigens, and/or one or more APV antigens).

[0272] The term “host” as used herein refers to a mammal, preferably a human.

[0273] The term “host cell” as used herein refers to the particular subject cell transfected with a nucleic acid molecule and the progeny or potential progeny of such a cell. Progeny of such a cell may not be identical to the parent cell transfected with the nucleic acid molecule due to mutations or environmental influences that may occur in succeeding generations or integration of the nucleic acid molecule into the host cell genome.

[0274] In certain embodiments of the invention, a “prophylactically effective serum titer” is the serum titer in a mammal, preferably a human, that reduces the incidence of a respiratory viral infection, particularly a RSV infection, a hMPV infection, a PIV infection, and/or a APV infection in a subject. Preferably, the prophylactically effective serum titer reduces the incidence of RSV infections, hMPV infections, PIV infections, and/or APV infections in a subject with the greatest probability of complications resulting from RSV infection, hMPV infection, PIV infection, and/or APV infection, respectively (e.g., a subject with cystic fibrosis, bronchopulmonary dysplasia, congenital heart disease, congenital immunodeficiency or acquired immunodeficiency, a subject who has had a bone marrow transplant, a human infant, or an elderly human). In certain other embodiments of the invention, a “prophylactically effective serum titer” is the serum titer in a cotton rat that results in a RSV titer, hMPV titer, PIV titer, and/or APV titer 5 days after challenge with 10⁵ pfu that is 90%, i.e., 1 log, lower than the RSV titer, hMPV titer, PIV titer, and/or APV titer 5 days after challenge with 10⁵ pfu of RSV, hMPV, APV, and/or PIV, respectively, in a cotton rat not administered an antibody or antibody fragment that immunospecifically binds to a RSV antigen, hMPV antigen, PIV antigen, and/or APV antigen, respectively. A prophylactically effective amount includes an amount that is prophylactically effective in combination with other agents, even if it is not prophylactically effective by itself.

[0275] In certain embodiments of the invention, a “therapeutically effective serum titer” is the serum titer in a mammal, preferably a human, that reduces the severity, the duration and/or the symptoms associated with a respiratory viral infection, particularly with a RSV infection, a hMPV infection, an APV infection, and/or a PIV infection in said mammal. Preferably, the therapeutically effective serum titer reduces the severity, the duration and/or the number symptoms associated with RSV infections, hMPV infections, APV infections, and/or PIV infections in humans with the greatest probability of complications resulting from a RSV, APV, hMPV, and/or PIV infection (e.g., a human with cystic fibrosis, bronchopulmonary dysplasia, congenital heart disease, congenital immunodeficiency or acquired immunodeficiency, a human who has had a bone marrow transplant, a human infant, or an elderly human). In certain other embodiments of the invention, a “therapeutically effective serum titer” is the serum titer in a cotton rat that results in a RSV, APV, hMPV, and/or PIV titer 5 days after challenge with 10⁵ pfu that is 90%, i.e., 1 log, lower than the RSV, APV, hMPV, and/or PIV titer 5 days after challenge with 10⁵ pfu of RSV APV, hMPV, and/or PIV, respectively, in a cotton rat not administered an antibody or antibody fragment that immunospecifically binds to a RSV, APV, hMPV, and/or PIV antigen, respectively. A therapeutically effective amount includes an amount that is therapeutically effective in combination with other agents, even if it is not therapeutically effective by itself.

[0276] The term “anti-PIV-antigen antibody” refers to an antibody or antibody fragment thereof that binds immunospecifically to a PIV antigen. A PIV antigen refers to a PIV polypeptide or fragment thereof such as of PIV nucleocapsid structural protein, PIV phosphoprotein, PIV fusion glycoprotein, PIV L protein, PIV matrix protein, PIV HN glycoprotein, PIV RNA-dependent RNA polymerase, PIV Y1 protein, PIV D protein, or PIV C protein. A PIV antigen also refers to a polypeptide that has a similar amino acid sequence compared to a PIV nucleocapsid structural protein, PIV phosphoprotein, PIV fusion glycoprotein, PIV L protein, PIV matrix protein, PIV HN glycoprotein, PIV RNA-dependent RNA polymerase, PIV Y1 protein, PIV D protein, or PIV C protein.

[0277] The term “anti-RSV-antigen antibody” refers to an antibody or antibody fragment thereof that binds immunospecifically to a RSV antigen. A RSV antigen refers to a RSV polypeptide or fragment thereof such as of RSV nucleoprotein, RSV phosphoprotein, RSV matrix protein, RSV small hydrophobic protein, RSV RNA-dependent RSV polymerase, RSV F protein, and RSV G protein. A RSV antigen also refers to a polypeptide that has a similar amino acid sequence compared to a RSV polypeptide or fragment thereof such as of RSV nucleoprotein, RSV phosphoprotein, RSV matrix protein, RSV small hydrophobic protein, RSV RNA-dependent RSV polymerase, RSV F protein, and RSV G protein.

[0278] The term “anti-hMPV-antigen antibody” refers to an antibody or antibody fragment thereof that binds immunospecifically to a hMPV antigen. A hMPV antigen refers to a hMPV polypeptide or fragment thereof such as of hMPV nucleoprotein, hMPV phosphoprotein, hMPV matrix protein, hMPV small hydrophobic protein, hMPV RNA-dependent hMPV polymerase, hMPV F protein, and hMPV G protein. A hMPV antigen also refers to a polypeptide that has a similar amino acid sequence compared to a hMPV polypeptide or fragment thereof such as of hMPV nucleoprotein, hMPV phosphoprotein, hMPV matrix protein, hMPV small hydrophobic protein, hMPV RNA-dependent hMPV polymerase, hMPV F protein, and hMPV G protein.

[0279] The term “serum titer” as used herein refers to an average serum titer in a population of least 10, preferably at least 20, and most preferably at least 40 subjects.

[0280] The term “subject” as used herein refers to vertebrate, preferably to a mammal. A subject can be a primate, a rat, a mouse, or a cotton rat. Most preferably, the subject is a human.

[0281] As used herein, the terms “immunospecifically binds” and “anti-RSV, anti-hMPV, or anti-PIV antibodies” and analogous terms refer to antibodies or fragments thereof that specifically bind to a RSV antigen, a hMPV antigen, or a PIV antigen in an ELISA assay or any other immuno-assay well-known to the skilled artisan (e.g., as described in section 4.8, infra). In certain embodiments, an antibody or fragment thereof that immunospecifically binds to a RSV antigen, a hMPV antigen, or a PIV antigen may bind to other peptides or polypeptides with lower or equal affinity as determined by, e.g., immunoassays, BIAcore, or other assays known in the art. In certain other embodiments, an antibody or fragment thereof that immunospecifically binds to a RSV antigen, a hMPV antigen, or a PIV antigen does not bind to other peptides or polypeptides as determined by, e.g., immunoassays, BIAcore, or other assays known in the art. Antibodies or fragments that immunospecifically bind to a RSV antigen, a hMPV antigen, or a PIV antigen may be cross-reactive with related antigens. Preferably, antibodies or fragments that immunospecifically bind to a RSV antigen, a hMPV antigen, or a PIV antigen do not cross-react with other antigens. Antibodies or fragments that immunospecifically bind to a RSV antigen, a hMPV antigen, or a PIV antigen can be identified, for example, by immunoassays, BIAcore, or other techniques known to those of skill in the art. In certain embodiments, an antibody or fragment thereof binds specifically to a RSV antigen, a hMPV antigen, or a PIV antigen when it binds to a RSV antigen, a hMPV antigen, or a PIV antigen with higher affinity than to any cross-reactive antigen as determined using experimental techniques, such as, but not limited to, radioimmunoassays (RIA), enzyme-linked immunosorbent assays (ELISAs), BIAcore, or other techniques known to those of skill in the art. See, e.g., Paul, ed., 1989, Fundamental Immunology Second Edition, Raven Press, New York at pages 332-336 for a discussion regarding antibody specificity. In certain embodiments, an antibody or fragment thereof binds specifically to a RSV antigen, a hMPV antigen, or a PIV antigen with equal affinity as to any cross-reactive antigen as determined using experimental techniques, such as radioimmunoassays (RIA) and enzyme-linked immunosorbent assays (ELISAs).

[0282] To determine the percent identity of two amino acid sequences or of two nucleic acid sequences, the sequences are aligned for optimal comparison purposes (e.g., gaps can be introduced in the sequence of a first amino acid or nucleic acid sequence for optimal alignment with a second amino acid or nucleic acid sequence). The amino acid residues or nucleotides at corresponding amino acid positions or nucleotide positions are then compared. When a position in the first sequence is occupied by the same amino acid residue or nucleotide as the corresponding position in the second sequence, then the molecules are identical at that position. The percent identity between the two sequences is a function of the number of identical positions shared by the sequences (i.e., % identity=number of identical overlapping positions/total number of positions×100%). In one embodiment, the two sequences are the same length.

[0283] The determination of percent identity between two sequences can also be accomplished using a mathematical algorithm. A preferred, non-limiting example of a mathematical algorithm utilized for the comparison of two sequences is the algorithm of Karlin and Altschul, 1990, Proc. Natl. Acad. Sci. U.S.A. 87:2264-2268, modified as in Karlin and Altschul, 1993, Proc. Natl. Acad. Sci. U.S.A. 90:5873-5877. Such an algorithm is incorporated into the NBLAST and XBLAST programs of Altschul et al., 1990, J. Mol. Biol. 215:403. BLAST nucleotide searches can be performed with the NBLAST nucleotide program parameters set, e.g., for score=100, wordlength=12 to obtain nucleotide sequences homologous to a nucleic acid molecules of the present invention. BLAST protein searches can be performed with the XBLAST program parameters set, e.g., to score-50, wordlength=3 to obtain amino acid sequences homologous to a protein molecule of the present invention. To obtain gapped alignments for comparison purposes, Gapped BLAST can be utilized as described in Altschul et al., 1997, Nucleic Acids Res. 25:3389-3402. Alternatively, PSI-BLAST can be used to perform an iterated search which detects distant relationships between molecules (Id.). When utilizing BLAST, Gapped BLAST, and PSI-Blast programs, the default parameters of the respective programs (e.g., of XBLAST and NBLAST) can be used (see, e.g., http://www.ncbi.nlm.nih.gov). Another preferred, non-limiting example of a mathematical algorithm utilized for the comparison of sequences is the algorithm of Myers and Miller, 1988, CABIOS 4:11-17. Such an algorithm is incorporated in the ALIGN program (version 2.0) which is part of the GCG sequence alignment software package. When utilizing the ALIGN program for comparing amino acid sequences, a PAM120 weight residue table, a gap length penalty of 12, and a gap penalty of 4 can be used.

[0284] The percent identity between two sequences can be determined using techniques similar to those described above, with or without allowing gaps. In calculating percent identity, typically only exact matches are counted.

[0285] References to RSV, PIV, hMPV, and APV include all groups, subgroups, isolates, types and strains of the respective virus. In a specific embodiment, RSV, PIV, and hMPV refer to all groups, subgroups, isolates, types and strains of human RSV, PIV, and hMPV, respectively.

### Abbreviations

[0286]

| | |
|---|---|
| cDNA | complementary DNA |
| L | large protein |
| M | matrix protein (lines inside of envelope) |
| F | fusion glycoprotein |
| HN | hemagglutinin-neuraminidase glycoprotein |
| N, NP or NC | nucleoprotein (associated with RNA and |
| | required for polymerase activity) |
| P | phosphoprotein |
| MOI | multiplicity of infection |
| NA | neuraminidase (envelope glycoprotein) |
| PIV | parainfluenza virus |
| nt | nucleotide |
| hMPV | human metapneumovirus |
| APV | avian pneumovirus |

### 4. DETAILED DESCRIPTION OF THE INVENTION

[0287] 4.1 Antibodies

[0288] The invention provides methods of passive immunotherapy for broad-spectrum prevention and, in certain embodiments, treatment of viral respiratory infection. The antibodies to be used with the methods of the invention include antibodies or antigen-binding fragments thereof that bind immunospecifically to a RSV antigen, antibodies or antigen-binding fragments thereof that bind immunospecifically to a hMPV antigen, antibodies or antigen-binding fragments thereof that bind immunospecifically to a PIV antigen, and, in a specific embodiment, human or humanized antibodies that bind immunospecifically to a hMPV antigen and that cross-react with an APV antigen. In a specific embodiment, the antibody to be used with the methods of the invention is an antibody that binds immunospecifically to a hMPV antigen and that cross-reacts with a turkey APV antigen. In a specific embodiment, the antibody to be used with the methods of the invention is a human or humanized antibody that binds immunospecifically to a hMPV antigen and that cross-reacts with a turkey APV antigen. In other specific embodiments, the anti-hMPV antibody does not react with a turkey APV antigen or an APV antigen from any other species of APV.

[0289] In certain embodiments, fragments of viral antigens are used as immunogen to produce antibodies to be used with the methods of the invention. In certain embodiments, fragments preferably contain a sequence of at least 4, at least 5, at least 6, at least 7, more preferably at least 8, at least 9, at least 10, at least 11, at least 12, at least 13, at least 14, at least 15, at least 20, at least 25, at least 30, at least 40, at least 50, at least 75 or at least 100 amino acids. In certain, more specific embodiments, a fragment is about 15 to about 30 amino acids long. Preferred polypeptides comprising immunogenic or antigenic epitopes are at least 10, 15, 20, 25, 30, 35, 40, 45, 50, 55, 60, 65, 70, 75, 80, 85, 90, 95, or 100 amino acid residues in length. Additional non-exclusive preferred antigenic epitopes include the antigenic epitopes disclosed herein, as well as portions thereof.

[0290] In certain embodiments, the anti-PIV-antigen antibody, the anti-RSV-antigen antibody, and/or the anti-hMPV-antigen antibody inhibit the binding of a virus that causes respiratory infection to a cell. In certain embodiments, the anti-PIV-antigen antibody, the anti-RSV-antigen antibody, and/or the anti-hMPV-antigen antibody inhibit in a subject the binding of a virus that causes respiratory infection to a cell of the subject. In certain embodiments, the anti-PIV-antigen antibody, the anti-RSV-antigen antibody, and/or the anti-hMPV-antigen antibody inhibit the infection of a subject with a virus that causes respiratory infections. In certain embodiments, the anti-PIV-antigen antibody, the anti-RSV-antigen antibody, and/or the anti-hMPV-antigen antibody cause neutralization of the virus that causes respiratory infections.

[0291] The antibodies to be used with the methods of the invention bind immunospecifically to a variety of viral antigens as discussed in sections 4.1.5, 4.1.6, and 4.1.7 below. In certain embodiments, at least one antibody to be used with the methods of the invention binds immunospecifically to an epitope of an antigen of PIV, hMPV, or RSV, and cross-reacts with another epitope on the same antigen of PIV, hMPV, or RSV, respectively. In certain embodiments, at least one antibody to be used with the methods of the invention binds immunospecifically to an epitope of an antigen of PIV, hMPV, or RSV, and cross-reacts with the analogous antigen of a different virus. For example, an antibody that binds immunospecifically to the F protein of RSV cross reacts with the F protein of hMPV. In a specific embodiment, the anti-RSV-antigen antibody is SYNAGIS®. SYNAGIS® is also known as Palivizumab. The amino acid sequence of SYNAGIS® (Palivizumab) is disclosed in International Application Publication WO 02/43660, entitled “Methods of Administering/Dosing Anti-RSV Antibodies for Prophylaxis and Treatment”, by Young et al., which is incorporated herein by reference in its entirety. In another specific embodiment, the anti-RSV-antigen antibody is not SYNAGIS®. In certain specific embodiments, the anti-RSV-antigen antibody is AFFF; P12f2 P12f4; P11d4; Ale9; A12a6; A13c4; A17d4; A4B4; 1X-493L1; FR H3-3F4; M3H9; Y10H6; DG; AFFF(1); 6H8; L1-7E5; L2-15B10; A13a11; A1h5; A4B4(1);A4B4-F52S; or A4B4L1FR-S28R. These antibodies are disclosed in International Application Publication No.: WO 02/43660, entitled “Methods of Administering/Dosing Anti-RSV Antibodies for Prophylaxis and Treatment”, by Young et al., which is incorporated herein by reference in its entirety.

[0292] In certain embodiments, at least one antibody to be used with the methods of the invention binds immunospecifically to an antigen of one subgroup (type, subtype, group, isolate etc.) of PIV, hMPV, or RSV and to the analogous antigen of another subgroup (type, subtype, group, isolate etc.) of PIV, hMPV, or RSV, respectively (see sections 4.1.5, 4.1.6, and 4.1.7, respectively).

[0293] Antibodies of the invention include, but are not limited to, monoclonal antibodies, multispecific antibodies, synthetic antibodies, human antibodies, humanized antibodies, chimeric antibodies, single-chain Fvs (scFv), single chain antibodies, Fab fragments, F(ab′) fragments, disulfide-linked Fvs (sdFv), and anti-idiotypic (anti-Id) antibodies (including, e.g., anti-Id antibodies to antibodies of the invention), and epitope-binding fragments of any of the above. In particular, antibodies of the present invention include immunoglobulin molecules and immunologically active portions of immunoglobulin molecules, i.e., molecules that contain an antigen binding site that immunospecifically binds to a RSV, PIV, APV, and/or hMPV antigen. The immunoglobulin molecules of the invention can be of any type (e.g., IgG, IgE, IgM, IgD, IgA and IgY), class (e.g., IgG₁, IgG₂, IgG₃, IgG₄, IgA₁ and IgA₂) or subclass of immunoglobulin molecule.

[0294] The antibodies of the invention may be from any animal origin including birds and mammals (e.g., human, murine, donkey, sheep, rabbit, goat, guinea pig, camel, horse, or chicken). Preferably, the antibodies of the invention are human or humanized monoclonal antibodies. As used herein, “human” antibodies include antibodies having the amino acid sequence of a human immunoglobulin and include antibodies isolated from human immunoglobulin libraries (including, but not limited to, synthetic libraries of immunoglobulin sequences homologous to human immunoglobulin sequences) or from mice that express antibodies from human genes.

[0295] The antibodies of the present invention may be monospecific, bispecific, trispecific or of greater multispecificity. Multispecific antibodies may be specific for different epitopes of one antigen of RSV, PIV, or hMPV. In certain embodiments, multispecific antibodies are specific for more than one antigen of RSV, PIV, or hMPV. In certain embodiments, multispecific antibodies are specific for an antigen of RSV and an antigen of hMPV. In certain embodiments, multispecific antibodies are specific for an antigen of PIV and an antigen of hMPV. In certain embodiments, multispecific antibodies are specific for an antigen of PIV and an antigen of RSV. In certain embodiments, multispecific antibodies are specific for an antigen of RSV, an antigen of PIV, and an antigen of hMPV. For multispecific antibodies see, e.g., PCT publications WO 93/17715, WO 92/08802, WO 91/00360, and WO 92/05793; Tutt, et al., J. Immunol. 147:60-69(1991); U.S. Pat. Nos. 4,474,893, 4,714,681, 4,925,648, 5,573,920, and 5,601,819; and Kostelny et al., J. Immunol. 148:1547-1553 (1992).

[0296] In certain embodiments, high potency antibodies can be used in the methods of the invention. For example, high potency antibodies can be produced by genetically engineering appropriate antibody gene sequences and expressing the antibody sequences in a suitable host. The antibodies produced can be screened to identify antibodies with, e.g., high kₒₙ values in a BIAcore assay (see section 4.8.3).

[0297] In certain embodiments, an antibody to be used with the methods of the present invention or fragment thereof has an affinity constant or Kₐ (kₒₙ/k_{off}) of at least 10² M⁻¹, at least 5×10² M⁻¹, at least 10³ M⁻¹, at least 5×10³ M⁻¹, at least 10⁴ M⁻¹, at least 5×10⁴ M⁻¹, at least 10⁵ M⁻¹, at least 5×10⁵ M⁻¹, at least 10⁶ M⁻¹, at least 5×10⁶ M⁻¹, at least 10⁷ M⁻¹, at least 5×10⁷ M⁻¹, at least 10⁸ M⁻¹, at least 5×10⁸ M⁻¹, at least 10⁹ M⁻¹, at least 5×10⁹ M⁻¹, at least 10¹⁰ M⁻¹, at least 5×10¹⁰ M⁻¹, at least 10¹¹ M⁻¹, at least 5×10¹¹ M⁻¹, at least 10¹² M⁻¹, at least 5×10¹² M⁻¹, at least 10¹³ M⁻¹, at least 5×10¹³ M⁻¹, at least 10¹⁴ M⁻¹, at least 5×10¹⁴ M⁻¹, at least 10¹⁵ M⁻¹, or at least 5×10¹⁵ M⁻¹. In yet another embodiment, an antibody to be used with the methods of the invention or fragment thereof has a dissociation constant or K_{d} (k_{off}/kₒₙ) of less than 10⁻² M, less than 5×10⁻² M, less than 10⁻³ M, less than 5×10⁻³ M, less than 10⁻⁴ M, less than 5×10⁻⁴ M, less than 10⁻⁵ M, less than 5×10⁻⁵ M, less than 10⁻⁶ M, less than 5×10⁻⁶ M, less than 10⁻⁷ M, less than 5×10⁻⁷ M, less than 10⁻⁸ M, less than 5×10⁻⁸ M, less than 10⁻⁹ M, less than 5×10⁻⁹ M, less than 10⁻¹⁰ M, less than 5×10⁻¹⁰ M, less than 10⁻¹¹ M, less than 5×10⁻¹¹ M, less than 10⁻¹² M, less than 5×10⁻¹² M, less than 10⁻¹³ M, less than 5×10⁻¹³ M, less than 10⁻¹⁴ M, less than 5×10⁻¹⁴ M, less than 10⁻¹⁵ M, or less than 5×10⁻¹⁵ M.

[0298] In certain embodiments, an antibody to be used with the methods of the invention or fragment thereof that has a median effective concentration (EC₅₀) of less than 0.01 nM, less than 0.025 nM, less than 0.05 nM, less than 0.1 nM, less than 0.25 nM, less than 0.5 nM, less than 0.75 nM, less than 1 nM, less than 1.25 nM, less than 1.5 nM, less than 1.75 nM, or less than 2 nM, in an in vitro microneutralization assay. The median effective concentration is the concentration of antibody or antibody fragments that neutralizes 50% of the RSV in an in vitro microneutralization assay. In a preferred embodiment, an antibody to be used with the methods of the invention or fragment thereof has an EC₅₀ of less than 0.01 nM, less than 0.025 nM, less than 0.05 nM, less than 0.1 nM, less than 0.25 nM, less than 0.5 nM, less than 0.75 nM, less than 1 nM, less than 1.25 nM, less than 1.5 nM, less than 1.75 nM, or less than 2 nM, in an in vitro microneutralization assay.

[0299] In certain embodiments, the antibodies to be used with the methods of the invention are derivatives of anti-RSV antigen, anti-PIV antigen, and/or anti-hMPV antigen antibodies. Standard techniques known to those of skill in the art can be used to introduce mutations in the nucleotide sequence encoding an antibody to be used with the methods of the invention, including, for example, site-directed mutagenesis and PCR-mediated mutagenesis which result in amino acid substitutions. Preferably, the derivatives include less than 25 amino acid substitutions, less than 20 amino acid substitutions, less than 15 amino acid substitutions, less than 10 amino acid substitutions, less than 5 amino acid substitutions, less than 4 amino acid substitutions, less than 3 amino acid substitutions, or less than 2 amino acid substitutions relative to the original molecule. In a preferred embodiment, the derivatives have conservative amino acid substitutions are made at one or more predicted non-essential amino acid residues. A “conservative amino acid substitution” is one in which the amino acid residue is replaced with an amino acid residue having a side chain with a similar charge. Families of amino acid residues having side chains with similar charges have been defined in the art. These families include amino acids with basic side chains (e.g. lysine, arginine, histidine), acidic side chains (e.g., aspartic acid, glutamic acid), uncharged polar side chains (e.g., glycine, asparagine, glutamine, serine, threonine, tyrosine, cysteine), nonpolar side chains (e.g., alanine, valine, leucine, isoleucine, proline, phenylalanine, methionine, tryptophan), beta-branched side chains (e.g., threonine, valine, isoleucine) and aromatic side chains (e.g., tyrosine, phenylalanine, tryptophan, histidine). Alternatively, mutations can be introduced randomly along all or part of the coding sequence, such as by saturation mutagenesis, and the resultant mutants can be screened for biological activity to identify mutants that retain activity. Following mutagenesis, the encoded protein can be expressed and the activity of the protein can be determined.

[0300] The antibodies to be used with the methods of the invention include derivatives that are modified, i.e, by the covalent attachment of any type of molecule to the antibody such that covalent attachment. For example, but not by way of limitation, the antibody derivatives include antibodies that have been modified, e.g., by glycosylation, acetylation, pegylation, phosphorylation, amidation, derivatization by known protecting/blocking groups, proteolytic cleavage, linkage to a cellular ligand or other protein, etc. Any of numerous chemical modifications may be carried out by known techniques, including, but not limited to specific chemical cleavage, acetylation, formylation, synthesis in the presence of tunicamycin, etc. Additionally, the derivative may contain one or more non-classical amino acids.

[0301] The present invention also provides antibodies of the invention or fragments thereof that comprise a framework region known to those of skill in the art. In certain embodiments, one or more framework regions, preferably, all of the framework regions, of an antibody to be used in the methods of the invention or fragment thereof are human. In certain other embodiments of the invention, the fragment region of an antibody of the invention or fragment thereof is humanized. In certain embodiments, the antibody to be used with the methods of the invention is a synthetic antibody, a monoclonal antibody, an intrabody, a chimeric antibody, a human antibody, a humanized chimeric antibody, a humanized antibody, a glycosylated antibody, a multispecific antibody, a human antibody, a single-chain antibody, or a bispecific antibody.

[0302] In certain embodiments of the invention, the antibodies to be used with the invention have half-lives in a mammal, preferably a human, of greater than 12 hours, greater than 1 day, greater than 3 days, greater than 6 days, greater than 10 days, greater than 15 days, greater than 20 days, greater than 25 days, greater than 30 days, greater than 35 days, greater than 40 days, greater than 45 days, greater than 2 months, greater than 3 months, greater than 4 months, or greater than 5 months. Antibodies or antigen-binding fragments thereof having increased in vivo half-lives can be generated by techniques known to those of skill in the art. For example, antibodies or antigen-binding fragments thereof with increased in vivo half-lives can be generated by modifying (e.g., substituting, deleting or adding) amino acid residues identified as involved in the interaction between the Fc domain and the FcRn receptor (see, e.g., PCT Publication No. WO 97/34631 and U.S. patent application No.: Ser. No. 10/020,354, entitled “Molecules with Extended Half-Lives, Compositions and Uses Thereof”, filed Dec. 12, 2001, by Johnson et al., which are incorporated herein by reference in their entireties). Such antibodies or antigen-binding fragments thereof can be tested for binding activity to RSV antigens as well as for in vivo efficacy using methods known to those skilled in the art, for example, by immunoassays described herein.

[0303] Further, antibodies or antigen-binding fragments thereof with increased in vivo half-lives can be generated by attaching to said antibodies or antibody fragments polymer molecules such as high molecular weight polyethyleneglycol (PEG). PEG can be attached to said antibodies or antibody fragments with or without a multifunctional linker either through site-specific conjugation of the PEG to the N- or C-terminus of said antibodies or antibody fragments or via epsilon-amino groups present on lysine residues. Linear or branched polymer derivatization that results in minimal loss of biological activity will be used. The degree of conjugation will be closely monitored by SDS-PAGE and mass spectrometry to ensure proper conjugation of PEG molecules to the antibodies. Unreacted PEG can be separated from antibody-PEG conjugates by, e.g., size exclusion or ion-exchange chromatography. PEG-derivatizated antibodies or antigen-binding fragments thereof can be tested for binding activity to RSV antigens as well as for in vivo efficacy using methods known to those skilled in the art, for example, by immunoassays described herein.

[0304] In certain embodiments, the antibodies to be used with the methods of the invention are fusion proteins comprising an antibody or fragment thereof that immunospecifically binds to a RSV, PIV, and/or hMPV antigen and a heterologous polypeptide. Preferably, the heterologous polypeptide that the antibody or antibody fragment is fused to is useful for targeting the antibody to respiratory epithelial cells.

[0305] In certain embodiments, antibodies to be used with the methods of the invention or fragments thereof disrupt or prevent the interaction between a RSV antigen, a PIV antigen, and/or a hMPV antigen and its host cell receptor.

[0306] In certain embodiments, antibodies to be used with the methods of the invention are single-chain antibodies. The design and construction of a single-chain antibody is described in Marasco et al, 1993, Proc Natl Acad Sci 90:7889-7893, which is incorporated herein by reference in its entirety.

[0307] In certain embodiments, the antibodies to be used with the invention binds to an intracellular epitope, i.e., are intrabodies. An intrabody comprises at least a portion of an antibody that is capable of immunospecifically binding an antigen and preferably does not contain sequences coding for its secretion. Such antibodies will bind its antigen intracellularly. In one embodiment, the intrabody comprises a single-chain Fv (“sFv”). sFv are antibody fragments comprising the V_{H} and V_{L} domains of antibody, wherein these domains are present in a single polypeptide chain. Generally, the Fv polypeptide further comprises a polypeptide linker between the V_{H} and V_{L} domains which enables the sFv to form the desired structure for antigen binding. For a review of sFv see Pluckthun in The Pharmacology of Monoclonal Antibodies, vol. 113, Rosenburg and Moore eds. Springer-Verlag, New York, pp. 269-315 (1994). In a further embodiment, the intrabody preferably does not encode an operable secretory sequence and thus remains within the cell (see generally Marasco, WA, 1998, “Intrabodies: Basic Research and Clinical Gene Therapy Applications” Springer:New York).

[0308] Generation of intrabodies is well-known to the skilled artisan and is described for example in U.S. Pat. Nos. 6,004,940; 6,072,036; 5,965,371, which are incorporated by reference in their entireties herein. Further, the construction of intrabodies is discussed in Ohage and Steipe, 1999, J. Mol. Biol. 291:1119-1128; Ohage et al., 1999, J. Mol. Biol. 291:1129-1134; and Wirtz and Steipe, 1999, Protein Science 8:2245-2250, which references are incorporated herein by reference in their entireties. Recombinant molecular biological techniques such as those described for recombinant production of antibodies (e.g., Section 4.1.2 and 4.1.3) may also be used in the generation of intrabodies. A discussion of intrabodies as antiviral agents can also be found in Marasco, 2001, Curr. Top. Microbiol. Immunol. 260:247-270, which is incorporated by reference herein in its entirety.

[0309] In particular, the invention provides methods for treating, preventing, and/or ameliorating one or more symptoms of a respiratory infection by administering either: (i) one or more anti-RSV-antigen intrabodies or fragments thereof and one or more anti-PIV-antigen intrabodies or fragments thereof; (ii) one or more anti-PIV-antigen intrabodies or fragments thereof and one or more anti-hMPV-antigen intrabodies or fragments thereof; or (iii) one or more anti-RSV-antigen intrabodies or fragments thereof, one or more anti-PIV-antigen intrabodies or fragments thereof, and one or more anti-hMPV-antigen intrabodies or fragments thereof. The invention also encompasses administering combinations of intrabodies and antibodies or antigen-binding fragments thereof. For example, but not by way of limitation, a method of the invention comprises administering one or more anti-RSV-antigen antibodies or antigen-binding fragments thereof and one or more anti-hMPV-antigen intrabodies or fragments thereof.

[0310] In one embodiment, intrabodies of the invention retain at least about 75% of the binding effectiveness of the complete antibody (i.e., having constant as well as variable regions) to the antigen. More preferably, the intrabody retains at least 85% of the binding effectiveness of the complete antibody. Still more preferably, the intrabody retains at least 90% of the binding effectiveness of the complete antibody. Even more preferably, the intrabody retains at least 95% of the binding effectiveness of the complete antibody.

[0311] In producing intrabodies, polynucleotides encoding variable region for both the V_{H} and V_{L} chains of interest can be cloned by using, for example, hybridoma mRNA or splenic mRNA as a template for PCR amplification of such domains (Huse et al., 1989, Science 246:1276). In one preferred embodiment, the polynucleotides encoding the V_{H} and V_{L} domains are joined by a polynucleotide sequence encoding a linker to make a single chain antibody (sFv). The sFv typically comprises a single peptide with the sequence V_{H}-linker-V_{L} or V_{L}-linker-V_{H}. The linker is chosen to permit the heavy chain and light chain to bind together in their proper conformational orientation (see for example, Huston, et al., 1991, Methods in Enzym. 203:46-121, which is incorporated herein by reference). In a further embodiment, the linker can span the distance between its points of fusion to each of the variable domains (e.g., 3.5 nm) to minimize distortion of the native Fv conformation. In such an embodiment, the linker is a polypeptide of at least 5 amino acid residues, at least 10 amino acid residues, at least 15 amino acid residues, or greater. In a further embodiment, the linker should not cause a steric interference with the V_{H} and V_{L} domains of the combining site. In such an embodiment, the linker is 35 amino acids or less, 30 amino acids or less, or 25 amino acids or less. Thus, in a most preferred embodiment, the linker is between 15-25 amino acid residues in length. In a further embodiment, the linker is hydrophilic and sufficiently flexible such that the V_{H} and V_{L} domains can adopt the conformation necessary to detect antigen. Intrabodies can be generated with different linker sequences inserted between identical V_{H} and V_{L} domains. A linker with the appropriate properties for a particular pair of V_{H} and V_{L} domains can be determined empirically by assess the degree of antigen binding for each. Examples of linkers include, but are not limited to, those sequences disclosed in Table 1.

TABLE 1
Sequence

(Gly Gly Gly Gly Ser)₃
Glu Ser Gly Arg Ser Gly Gly Gly Gly Ser Gly Gly Gly Gly Ser
Glu Gly Lys Ser Ser Gly Ser Gly Ser Glu Ser Lys Ser Thr
Glu Gly Lys Ser Ser Gly Ser Gly Ser Glu Ser Lys Ser Thr Gln
Glu Gly Lys Ser Ser Gly Ser Gly Ser Glu Ser Lys Val Asp
Gly Ser Thr Ser Gly Ser Gly Lys Ser Ser Glu Gly Lys Gly
Lys Glu Ser Gly Ser Val Ser Ser Glu Gln Leu Ala Gln Phe Arg Ser
Leu Asp
Glu Ser Gly Ser Val Ser Ser Glu Glu Leu Ala Phe Arg Ser Leu Asp

[0312] In one embodiment, intrabodies are expressed in the cytoplasm. In other embodiments, the intrabodies are localized to various intracellular locations. In such embodiments, specific localization sequences can be atached to the intranucleotide polypepetide to direct the intrabody to a specific location. Intrabodies can be localized, for example, to the folowing intracellular locations: endoplasmic reticulum (Munro et al., 1987, Cell 48:899-907; Hangejorden et al., 1991, J. Biol. Chem. 266:6015); nucleus (Lanford et al., 1986, Cell 46:575; Stanton et al., 1986, PNAS 83:1772; Harlow et al., 1985, Mol. Cell Biol. 5:1605); nucleolar region (Seomi et al., 1990, J. Virology 64:1803; Kubota et al., 1989, Biochem. Biophys. Res. Comm. 162:963; Siomi et al., 1998, Cell 55:197); endosomal compartment (Bakke et al., 1990, Cell 63:707-716); mitochondrial matrix (Pugsley, A. P., 1989, “Protein Targeting”, Academic Press, Inc.); Golgi apparatus (Tang et al., 1992, J. Bio. Chem. 267:10122-6); liposomes (Letourneur et al., 1992, Cell 69:1183); and plasma membrane (Marchildon et al., 1984, PNAS 81:7679-82; Henderson et al., 1987, PNAS 89:339-43; Rhee et al., 1987, J. Virol. 61:1045-53; Schultz et al., 1984, J. Virol. 133:431-7; Ootsuyama et al., 1985, Jpn. J Can. Res. 76:1132-5; Ratner et al., 1985, Nature 313:277-84). Examples of localization signals include, but are not limited to, those sequences disclosed in Table 2.

TABLE 2

| Localization | Sequence |
|---|---|
| endoplasmic reticulum | Lys Asp Glu Leu |
| endoplasmic reticulum | Asp Asp Glu Leu |
| endoplasmic reticulum | Asp Glu Glu Leu |
| endoplasmic reticulum | Gln Glu Asp Leu |
| endoplasmic reticulum | Arg Asp Glu Leu |
| nucleus | Pro Lys Lys Lys Arg Lys Val |
| nucleus | Pro Gln Lys Lys Ile Lys Ser |
| nucleus | Gln Pro Lys Lys Pro |
| nucleus | Arg Lys Lys Arg |
| nucleolar region | Arg Lys Lys Arg Arg Gln Arg Arg Arg |
| | Ala His Gln |
| nucleolar region | Arg Gln Ala Arg Arg Asn Arg Arg Arg |
| | Arg Trp Arg Glu Arg Gln Arg |
| nucleolar region | Met Pro Leu Thr Arg Arg Arg Pro Ala Ala |
| | Ser Gln Ala Leu Ala Pro Pro Thr Pro |
| endosomal compartment | Met Asp Asp Gln Arg Asp Leu Ile Ser |
| | Asn Asn Glu Gln Leu Pro |
| mitochondrial matrix | Met Leu Phe Asn Leu Arg Xaa Xaa Leu |
| | Asn Asn Ala Ala Phe Arg His Gly His |
| | Asn Phe Met Val Arg Asn Phe Arg Cys |
| | Gly Gln Pro Leu Xaa |
| plasma membrane | GCVCSSNP |
| plasma membrane | GQTVTTPL |
| plasma membrane | GQELSQHE |
| plasma membrane | GNSPSYNP |
| plasma membrane | GVSGSKGQ |
| plasma membrane | GQTITTPL |
| plasma membrane | GQTLTTPL |
| plasma membrane | GQIFSRSA |
| plasma membrane | GQIHGLSP |
| plasma membrane | GARASVLS |
| plasma membrane | GCTLSAEE |

[0313] V_{H} and V_{L} domains are made up of the immunoglobulin domains that generally have a conserved structural disulfide bond. In embodiments where the intrabodies are expressed in a reducing environment (e.g., the cytoplasm), such a structural feature cannot exist. Mutations can be made to the intrabody polypeptide sequence to compensate for the decreased stability of the immunoglobulin structure resulting from the absence of disulfide bond formation. In one embodiment, the V_{H} and/or V_{L} domains of the intrabodies contain one or more point mutations such that their expression is stabilized in reducing environments (see Steipe et al., 1994, J. Mol. Biol. 240:188-92; Wirtz and Steipe, 1999, Protein Science 8:2245-50; Ohage and Steipe, 1999, J. Mol. Biol. 291:1119-28; Ohage et al., 1999, J. Mol. Biol. 291:1129-34).

[0314] 4.1.1 Methods for Producing Antibodies

[0315] The antibodies to be used with the methods of the invention or fragments thereof can is be produced by any method known in the art for the synthesis of antibodies, in particular, by chemical synthesis or preferably, by recombinant expression techniques.

[0316] Polyclonal antibodies to a RSV, PIV, and/or hMPV antigen can be produced by various procedures well known in the art. For example, a RSV, PIV, and/or hMPV antigen can be administered to various host animals including, but not limited to, rabbits, mice, rats, etc. to induce the production of sera containing polyclonal antibodies specific for the RSV, PIV, and/or hMPV antigen. Various adjuvants may be used to increase the immunological response, depending on the host species, and include but are not limited to, Freund's (complete and incomplete), mineral gels such as aluminum hydroxide, surface active substances such as lysolecithin, pluronic polyols, polyanions, peptides, oil emulsions, keyhole limpet hemocyanins, dinitrophenol, and potentially useful human adjuvants such as BCG (bacille Calmette-Guerin) and Corynebacterium parvum. Such adjuvants are also well known in the art.

[0317] Monoclonal antibodies can be prepared using a wide variety of techniques known in the art including the use of hybridoma, recombinant, and phage display technologies, or a combination thereof. For example, monoclonal antibodies can be produced using hybridoma techniques including those known in the art and taught, for example, in Harlow et al., Antibodies: A Laboratory Manual, (Cold Spring Harbor Laboratory Press, 2nd ed. 1988); Hammerling, et al., in: Monoclonal Antibodies and T-Cell Hybridomas 563-681 (Elsevier, N.Y., 1981) (said references incorporated by reference in their entireties). The term “monoclonal antibody” as used herein is not limited to antibodies produced through hybridoma technology. The term “monoclonal antibody” refers to an antibody that is derived from a single clone, including any eukaryotic, prokaryotic, or phage clone, and not the method by which it is produced.

[0318] Methods for producing and screening for specific antibodies using hybridoma technology are routine and well known in the art. Briefly, mice can be immunized with a RSV, PIV, and/or hMPV antigen and once an immune response is detected, e.g., antibodies specific for the RSV, PIV, and/or hMPV antigen are detected in the mouse serum, the mouse spleen is harvested and splenocytes isolated. The splenocytes are then fused by well known techniques to any suitable myeloma cells, for example cells from cell line SP20 available from the ATCC. Hybridomas are selected and cloned by limited dilution. The hybridoma clones are then assayed by methods known in the art for cells that secrete antibodies capable of binding a polypeptide of the invention. Ascites fluid, which generally contains high levels of antibodies, can be generated by immunizing mice with positive hybridoma clones.

[0319] In a specific embodiment, an antigen of APV is used to generate antibodies agains hMPV.

[0320] In certain embodiments, a method of generating monoclonal antibodies comprises culturing a hybridoma cell secreting an antibody of the invention wherein, preferably, the hybridoma is generated by fusing splenocytes isolated from a mouse immunized with a RSV, PIV, and/or hMPV antigen with myeloma cells and then screening the hybridomas resulting from the fusion for hybridoma clones that secrete an antibody able to bind a RSV, PIV, and/or hMPV antigen.

[0321] Antibody fragments which recognize specific RSV, PIV, and/or hMPV epitopes may be generated by any technique known to those of skill in the art. For example, Fab and F(ab′)2 fragments of the invention may be produced by proteolytic cleavage of immunoglobulin molecules, using enzymes such as papain (to produce Fab fragments) or pepsin (to produce F(ab′)2 fragments). F(ab′)2 fragments contain the variable region, the light chain constant region and the CH1 domain of the heavy chain. Further, the antibodies to be used with the present invention can also be generated using various phage display methods known in the art.

[0322] In phage display methods, functional antibody domains are displayed on the surface of phage particles which carry the polynucleotide sequences encoding them. In particular, DNA sequences encoding VH and VL domains are amplified from animal cDNA libraries (e.g., human or murine cDNA libraries of lymphoid tissues). The DNA encoding the VH and VL domains are recombined together with an scFv linker by PCR and cloned into a phagemid vector (e.g., p CANTAB 6 or pComb 3 HSS). The vector is electroporated in E. coli and the E. coli is infected with helper phage. Phage used in these methods are typically filamentous phage including fd and M13 and the VH and VL domains are usually recombinantly fused to either the phage gene III or gene VIII. Phage expressing an antigen binding domain that binds to a RSV, PIV, and/or hMPV antigen of interest can be selected or identified with antigen, e.g., using labeled antigen or antigen bound or captured to a solid surface or bead. Examples of phage display methods that can be used to make the antibodies of the present invention include those disclosed in Brinkman et al., 1995, J. Immunol. Methods 182:41-50; Ames et al., 1995, J. Immunol. Methods 184:177-186; Kettleborough et al., 1994, Eur. J. Immunol. 24:952-958; Persic et al., 1997, Gene 187:9-18; Burton et al., 1994, Advances in Immunology 57:191-280; PCT application No. PCT/GB91/O1 134; PCT publication Nos. WO 90/02809, WO 91/10737, WO 92/01047, WO 92/18619, WO 93/1 1236, WO 95/15982, WO 95/20401, and WO97/13844; and U.S. Pat. Nos. 5,698,426, 5,223,409, 5,403,484, 5,580,717, 5,427,908, 5,750,753, 5,821,047, 5,571,698, 5,427,908, 5,516,637, 5,780,225, 5,658,727, 5,733,743 and 5,969,108; each of which is incorporated herein by reference in its entirety.

[0323] As described in the above references, after phage selection, the antibody coding regions from the phage can be isolated and used to generate whole antibodies, including human antibodies, or any other desired antigen binding fragment, and expressed in any desired host, including mammalian cells, insect cells, plant cells, yeast, and bacteria, e.g., as described below. Techniques to recombinantly produce Fab, Fab′ and F(ab′)2 fragments can also be employed using methods known in the art such as those disclosed in PCT publication No. WO 92/22324; Mullinax et al., 1992, BioTechniques 12(6):864-869; Sawai et al., 1995, AJRI 34:26-34; and Better et al., 1988, Science 240:1041-1043 (said references incorporated by reference in their entireties).

[0324] To generate whole antibodies, PCR primers including VH or VL nucleotide sequences, a restriction site, and a flanking sequence to protect the restriction site can be used to amplify the VH or VL sequences in scFv clones. Utilizing cloning techniques known to those of skill in the art, the PCR amplified VH domains can be cloned into vectors expressing a VH constant region, e.g., the human gamma 4 constant region, and the PCR amplified VL domains can be cloned into vectors expressing a VL constant region, e.g., human kappa or lamba constant regions. Preferably, the vectors for expressing the VH or VL domains comprise an EF-1α promoter, a secretion signal, a cloning site for the variable domain, constant domains, and a selection marker such as neomycin. The VH and VL domains may also cloned into one vector expressing the necessary constant regions. The heavy chain conversion vectors and light chain conversion vectors are then co-transfected into cell lines to generate stable or transient cell lines that express full-length antibodies, e.g., IgG, using techniques known to those of skill in the art.

[0325] For some uses, including in vivo use of antibodies in humans and in vitro detection assays, it may be preferable to use human or chimeric antibodies. Completely human antibodies are particularly desirable for therapeutic treatment of human subjects. Human antibodies can be made by a variety of methods known in the art including phage display methods described above using antibody libraries derived from human immunoglobulin sequences or synthetic sequences homologous to human immunoglobulin sequences. See also U.S. Pat. Nos. 4,444,887 and 4,716,111; and PCT publications WO 98/46645, WO 98/50433, WO 98/24893, WO98/16654, WO 96/34096, WO 96/33735, and WO 91/10741; each of which is incorporated herein by reference in its entirety.

[0326] Human antibodies can also be produced using transgenic mice which are incapable of expressing functional endogenous immunoglobulins, but which can express human immunoglobulin genes. For example, the human heavy and light chain immunoglobulin gene complexes may be introduced randomly or by homologous recombination into mouse embryonic stem cells. Alternatively, the human variable region, constant region, and diversity region may be introduced into mouse embryonic stem cells in addition to the human heavy and light chain genes. The mouse heavy and light chain immunoglobulin genes may be rendered non-functional separately or simultaneously with the introduction of human immunoglobulin loci by homologous recombination. In particular, homozygous deletion of the JH region prevents endogenous antibody production. The modified embryonic stem cells are expanded and microinjected into blastocysts to produce chimeric mice. The chimeric mice are then be bred to produce homozygous offspring which express human antibodies. The transgenic mice are immunized in the normal fashion with a selected antigen, e.g., all or a portion of a polypeptide of the invention. Monoclonal antibodies directed against the antigen can be obtained from the immunized, transgenic mice using conventional hybridoma technology. The human immunoglobulin transgenes harbored by the transgenic mice rearrange during B cell differentiation, and subsequently undergo class switching and somatic mutation. Thus, using such a technique, it is possible to produce therapeutically useful IgG, IgA, IgM and IgE antibodies. For an overview of this technology for producing human antibodies, see Lonberg and Huszar (1995, Int. Rev. Immunol. 13:65-93). For a detailed discussion of this technology for producing human antibodies and human monoclonal antibodies and protocols for producing such antibodies, see, e.g., PCT publication Nos. WO 98/24893, WO 96/34096, and WO 96/33735; and U.S. Pat. Nos. 5,413,923, 5,625,126, 5,633,425, 5,569,825, 5,661,016, 5,545,806, 5,814,318, and 5,939,598, which are incorporated by reference herein in their entireties. In addition, companies such as Medarex, Inc. (Princeton, N.J.), Abgenix, Inc. (Freemont, Calif.) and Genpharm (San Jose, Calif.) can be engaged to provide human antibodies directed against a selected antigen using technology similar to that described above.

[0327] A chimeric antibody is a molecule in which different portions of the antibody are derived from different immunoglobulin molecules such as antibodies having a variable region derived from a non-human (e.g., murine) antibody and a human immunoglobulin constant region. Methods for producing chimeric antibodies are known in the art. See e.g., Morrison, 1985, Science 229:1202; Oi et al., 1986, BioTechniques 4:214; Gillies et al., 1989, J. Immunol. Methods 125:191-202; and U.S. Pat. Nos. 5,807,715, 4,816,567, and 4,816,397, which are incorporated herein by reference in their entireties. Chimeric antibodies comprising one or more CDRs from human species and framework regions from a non-human immunoglobulin molecule can be produced using a variety of techniques known in the art including, for example, CDR-grafting (EP 239,400; PCT publication No. WO 91/09967; and U.S. Pat. Nos. 5,225,539, 5,530,101, and 5,585,089), veneering or resurfacing (EP 592,106; EP 519,596; Padlan, 1991, Molecular Immunology 28(4/5):489-498; Studnicka et al., 1994, Protein Engineering 7(6):805-814; and Roguska et al., 1994, PNAS 91:969-973), and chain shuffling (U.S. Pat. No. 5,565,332). In a preferred embodiment, antibodies comprise one or more CDRs listed in Table 3 (preferably all CDRs) and human framework regions. Often, framework residues in the framework regions will be substituted with the corresponding residue from the CDR donor antibody to alter, preferably improve, antigen binding. These framework substitutions are identified by methods well known in the art, e.g., by modeling of the interactions of the CDR and framework residues to identify framework is residues important for antigen binding and sequence comparison to identify unusual framework residues at particular positions. (See, e.g., Queen et al., U.S. Pat. No. 5,585,089; and Riechmann et al., 1988, Nature 332:323, which are incorporated herein by reference in their entireties.)

[0328] Further, the antibodies to be used with the methods of the invention can, in turn, be utilized to generate anti-idiotype antibodies that “mimic” RSV, PIV, and/or hMPV antigens using techniques well known to those skilled in the art. (See, e.g., Greenspan & Bona, 1989, FASEB J. 7(5):437-444; and Nissinoff, 1991, J. Immunol. 147(8):2429-2438). For example, antibodies of the invention which bind to and competitively inhibit the binding of RSV, PIV, and/or hMPV (as determined by assays well known in the art) to its host cell receptor can be used to generate anti-idiotypes that “mimic” a RSV, PUV, and/or hMPV antigen and bind to the RSV, PIV, and/or hMPV receptors, i.e., compete with the virus for binding to the host cell, therefore decreasing the infection rate of host cells with virus.

[0329] In certain other embodiments, anti-anti-idiotypes, generated by techniques well-known to the skilled artisan, are used in the methods of the invention. Such anti-anti-idiotypes mimic the binding domain of the anti-RSV, -PIV, and/or -hMPV antibody and, as a consequence, bind to and neutralize RSV, PIV, and/or hMPV. Such neutralizing anti-anti-idiotypes or Fab fragments of such anti-anti-idiotypes can be used in therapeutic regimens to neutralize RSV, PIV, and/or hMPV. For example, such anti-anti-idiotypic antibodies can be used to bind RSV, PIV, and/or hMPV and thereby prevent infection.

[0330] In certain embodiments, a fragment of a protein of RSV, PIV, or hMPV is used as an immunogen for the generation of antibodies to be used with the methods of the invention. A fragment of a protein of RSV, PIV, or hMPV to be used as an immunogen can be at least 10, 20, 30, 40, 50, 75, 100, 250, 500, 750, or at least 1000 amino acids in length. In certain embodiments a synthetic peptide of a protein of RSV, PIV, or hMPV is used as an immunogen.

[0331] In certain embodiments, fragments of viral antigens are used as immunogen to produce antibodies to be used with the methods of the invention. In certain embodiments, fragments preferably contain a sequence of at least 4, at least 5, at least 6, at least 7, more preferably at least 8, at least 9, at least 10, at least 11, at least 12, at least 13, at least 14, at least 15, at least 20, at least 25, at least 30, at least 40, at least 50, at least 75 or at least 100 amino acids. In certain, more specific embodiments, a fragment is about 15 to about 30 amino acids long. Preferred polypeptides comprising immunogenic or antigenic epitopes are at least 10, 15, 20, 25, 30, 35, 40, 45, 50, 55, 60, 65, 70, 75, 80, 85, 90, 95, or 100 amino acid residues in length. Additional non-exclusive preferred antigenic epitopes include the antigenic epitopes disclosed herein, as well as portions thereof.

[0332] 4.1.2 Polynucleotides Encoding an Antibody

[0333] Polynucleotides encoding antibodies to be used with the invention may be obtained, and the nucleotide sequence of the polynucleotides determined, by any method known in the art. Since amino acid sequences of some antibodies are known (as described in Table 2), nucleotide sequences encoding these antibodies can be determined using methods well known in the art, i.e., nucleotide codons known to encode particular amino acids are assembled in such a way to generate a nucleic acid that encodes the antibody or fragment thereof of the invention. Such a polynucleotide encoding the antibody may be assembled from chemically synthesized oligonucleotides (e.g., as described in Kutmeier et al., 1994, BioTechniques 17:242), which, briefly, involves the synthesis of overlapping oligonucleotides containing portions of the sequence encoding the antibody, annealing and ligating of those oligonucleotides, and then amplification of the ligated oligonucleotides by PCR.

[0334] Alternatively, a polynucleotide encoding an antibody may be generated from nucleic acid from a suitable source. If a clone containing a nucleic acid encoding a particular antibody is not available, but the sequence of the antibody molecule is known, a nucleic acid encoding the immunoglobulin may be chemically synthesized or obtained from a suitable source (e.g., an antibody cDNA library, or a cDNA library generated from, or nucleic acid, preferably poly A+ RNA, isolated from, any tissue or cells expressing the antibody, such as hybridoma cells selected to express an antibody of the invention) by PCR amplification using synthetic primers hybridizable to the 3′ and 5′ ends of the sequence or by cloning using an oligonucleotide probe specific for the particular gene sequence to identify, e.g., a cDNA clone from a cDNA library that encodes the antibody. Amplified nucleic acids generated by PCR may then be cloned into replicable cloning vectors using any method well known in the art.

[0335] Once the nucleotide sequence of the antibody is determined, the nucleotide sequence of the antibody may be manipulated using methods well known in the art for the manipulation of nucleotide sequences, e.g., recombinant DNA techniques, site directed mutagenesis, PCR, etc. (see, for example, the techniques described in Sambrook et al., 1990, Molecular Cloning, A Laboratory Manual, 2d Ed., Cold Spring Harbor Laboratory, Cold Spring Harbor, N.Y. and Ausubel et al., eds., 1998, Current Protocols in Molecular Biology, John Wiley & Sons, NY, which are both incorporated by reference herein in their entireties), to generate antibodies having a different amino acid sequence, for example to create amino acid substitutions, deletions, and/or insertions.

[0336] In a specific embodiment, one or more of the CDRs is inserted within framework regions using routine recombinant DNA techniques. The framework regions may be naturally occurring or consensus framework regions, and preferably human framework regions (see, e.g., Chothia et al., 1998, J. Mol. Biol. 278: 457-479 for a listing of human framework regions). Preferably, the polynucleotide generated by the combination of the framework regions and CDRs encodes an antibody that specifically binds to a RSV, PIV, and/or hMPV antigen. In certain embodiments, one or more amino acid substitutions may be made within the framework regions, and, preferably, the amino acid substitutions improve binding of the antibody to its antigen. Additionally, such methods may be used to make amino acid substitutions or deletions of one or more variable region cysteine residues participating in an intrachain disulfide bond to generate antibody molecules lacking one or more intrachain disulfide bonds. Other alterations to the polynucleotide are encompassed by the present invention and within the skill of the art.

[0337] 4.1.3 Recombinant Expression of an Antibody

[0338] Recombinant expression of an antibody to be used with the methods of the invention, derivative or analog thereof, (e.g., a heavy or light chain of an antibody of the invention or a portion thereof or a single chain antibody of the invention), requires construction of an expression vector containing a polynucleotide that encodes the antibody. Once a polynucleotide encoding an antibody molecule or a heavy or light chain of an antibody, or portion thereof (preferably, but not necessarily, containing the heavy or light chain variable domain), of the invention has been obtained, the vector for the production of the antibody molecule may be produced by recombinant DNA technology using techniques well known in the art. Thus, methods for preparing a protein by expressing a polynucleotide containing an antibody encoding nucleotide sequence are described herein. Methods which are well known to those skilled in the art can be used to construct expression vectors containing antibody coding sequences and appropriate transcriptional and translational control signals. These methods include, for example, in vitro recombinant DNA techniques, synthetic techniques, and in vivo genetic recombination. The invention, thus, provides replicable vectors comprising a nucleotide sequence encoding an antibody molecule of the invention, a heavy or light chain of an antibody, a heavy or light chain variable domain of an antibody or a portion thereof, or a heavy or light chain CDR, operably linked to a promoter. Such vectors may include the nucleotide sequence encoding the constant region of the antibody molecule (see, e.g., PCT Publication WO 86/05807; PCT Publication WO 89/01036; and U.S. Pat. No. 5,122,464) and the variable domain of the antibody may be cloned into such a vector for expression of the entire heavy, the entire light chain, or both the entire heavy and light chains.

[0339] The expression vector is transferred to a host cell by conventional techniques and the transfected cells are then cultured by conventional techniques to produce an antibody of the invention. Thus, the invention includes host cells containing a polynucleotide encoding an antibody of the invention or fragments thereof, or a heavy or light chain thereof, or portion thereof, or a single chain antibody of the invention, operably linked to a heterologous promoter. In preferred embodiments for the expression of double-chained antibodies, vectors encoding both the heavy and light chains may be co-expressed in the host cell for expression of the entire immunoglobulin molecule, as detailed below.

[0340] A variety of host-expression vector systems may be utilized to express the antibody molecules of the invention (see, e.g., U.S. Pat. No. 5,807,715). Such host-expression systems represent vehicles by which the coding sequences of interest may be produced and subsequently purified, but also represent cells which may, when transformed or transfected with the appropriate nucleotide coding sequences, express an antibody molecule of the invention in situ. These include but are not limited to microorganisms such as bacteria (e.g., E. coli and B. subtilis) transformed with recombinant bacteriophage DNA, plasmid DNA or cosmid DNA expression vectors containing antibody coding sequences; yeast (e.g., Saccharomyces Pichia) transformed with recombinant yeast expression vectors containing antibody coding sequences; insect cell systems infected with recombinant virus expression vectors (e.g., baculovirus) containing antibody coding sequences; plant cell systems infected with recombinant virus expression vectors (e.g., cauliflower mosaic virus, CaMV; tobacco mosaic virus, TMV) or transformed with recombinant plasmid expression vectors (e.g., Ti plasmid) containing antibody coding sequences; or mammalian cell systems (e.g., COS, CHO, BHK, 293, NSO, and 3T3 cells) harboring recombinant expression constructs containing promoters derived from the genome of mammalian cells (e.g., metallothionein promoter) or from mammalian viruses (e.g., the adenovirus late promoter; the vaccinia virus 7.5K promoter). Preferably, bacterial cells such as Escherichia coli, and more preferably, eukaryotic cells, especially for the expression of whole recombinant antibody molecule, are used for the expression of a recombinant antibody molecule. For example, mammalian cells such as Chinese hamster ovary cells (CHO), in conjunction with a vector such as the major intermediate early gene promoter element from human cytomegalovirus is an effective expression system for antibodies (Foecking et al., 1986, Gene 45:101; and Cockett et al., 1990, Bio/Technology 8:2). In a specific embodiment, the expression of nucleotide sequences encoding antibodies or antigen-binding fragments thereof which immunospecifically bind to one or more RSV antigens is regulated by a constitutive promoter, inducible promoter or tissue specific promoter.

[0341] In bacterial systems, a number of expression vectors may be advantageously selected depending upon the use intended for the antibody molecule being expressed. For example, when a large quantity of such a protein is to be produced, for the generation of pharmaceutical compositions of an antibody molecule, vectors which direct the expression of high levels of fusion protein products that are readily purified may be desirable. Such vectors include, but are not limited to, the E. coli expression vector pUR278 (Ruther et al., 1983, EMBO 12:1791), in which the antibody coding sequence may be ligated individually into the vector in frame with the lac Z coding region so that a fusion protein is produced; pIN vectors (Inouye & Inouye, 1985, Nucleic Acids Res. 13:3101-3109; Van Heeke & Schuster, 1989, J. Biol. Chem. 24:5503-5509); and the like. pGEX vectors may also be used to express foreign polypeptides as fusion proteins with glutathione 5-transferase (GST). In general, such fusion proteins are soluble and can easily be purified from lysed cells by adsorption and binding to matrix glutathione agarose beads followed by elution in the presence of free glutathione. The pGEX vectors are designed to include thrombin or factor Xa protease cleavage sites so that the cloned target gene product can be released from the GST moiety.

[0342] In an insect system, Autographa californica nuclear polyhedrosis virus (AcNPV) is used as a vector to express foreign genes. The virus grows in Spodoptera frugiperda cells. The antibody coding sequence may be cloned individually into non-essential regions (for example, the polyhedrin gene) of the virus and placed under control of an AcNPV promoter (for example, the polyhedrin promoter).

[0343] In mammalian host cells, a number of viral-based expression systems may be utilized.

[0344] In cases where an adenovirus is used as an expression vector, the antibody coding sequence of interest may be ligated to an adenovirus transcription/translation control complex, e.g., the late promoter and tripartite leader sequence. This chimeric gene may then be inserted in the adenovirus genome by in vitro or in vivo recombination. Insertion in a non-essential region of the viral genome (e.g., region E1 or E3) will result in a recombinant virus that is viable and capable of expressing the antibody molecule in infected hosts (e.g., see Logan & Shenk, 1984, Proc. Natl. Acad. Sci. USA 81:355-359). Specific initiation signals may also be required for efficient translation of inserted antibody coding sequences. These signals include the ATG initiation codon and adjacent sequences. Furthermore, the initiation codon must be in phase with the reading frame of the desired coding sequence to ensure translation of the entire insert. These exogenous translational control signals and initiation codons can be of a variety of origins, both natural and synthetic. The efficiency of expression may be enhanced by the inclusion of appropriate transcription enhancer elements, transcription terminators, etc. (see, e.g., Bittner et al., 1987, Methods in Enzymol. 153:516-544).

[0345] In addition, a host cell strain may be chosen which modulates the expression of the inserted sequences, or modifies and processes the gene product in the specific fashion desired. Such modifications (e.g., glycosylation) and processing (e.g., cleavage) of protein products may be important for the function of the protein. Different host cells have characteristic and specific mechanisms for the post-translational processing and modification of proteins and gene products. Appropriate cell lines or host systems can be chosen to ensure the correct modification and processing of the foreign protein expressed. To this end, eukaryotic host cells which possess the cellular machinery for proper processing of the primary transcript, glycosylation, and phosphorylation of the gene product may be used. Such mammalian host cells include but are not limited to CHO, VERY, BHK, Hela, COS, MDCK, 293, 3T3, W138, BT483, Hs578T, HTB2, BT20 and T47D, NS0 (a murine myeloma cell line that does not endogenously produce any immunoglobulin chains), CRL7O3O and HsS78Bst cells.

[0346] For long-term, high-yield production of recombinant proteins, stable expression is preferred. For example, cell lines which stably express the antibody molecule may be engineered. Rather than using expression vectors which contain viral origins of replication, host cells can be transformed with DNA controlled by appropriate expression control elements (e.g., promoter, enhancer, sequences, transcription terminators, polyadenylation sites, etc.), and a selectable marker. Following the introduction of the foreign DNA, engineered cells may be allowed to grow for 1-2 days in an enriched media, and then are switched to a selective media. The selectable marker in the recombinant plasmid confers resistance to the selection and allows cells to stably integrate the plasmid into their chromosomes and grow to form foci which in turn can be cloned and expanded into cell lines. This method may advantageously be used to engineer cell lines which express the antibody molecule. Such engineered cell lines may be particularly useful in screening and evaluation of compositions that interact directly or indirectly with the antibody molecule.

[0347] A number of selection systems may be used, including but not limited to, the herpes simplex virus thymidine kinase (Wigler et al., 1977, Cell 11:223), hypoxanthineguanine phosphoribosyltransferase (Szybalska & Szybalski, 1992, Proc. Natl. Acad. Sci. USA 48:202), and adenine phosphoribosyltransferase (Lowy et al., 1980, Cell 22:8-17) genes can be employed in tk-, hgprt- or aprt-cells, respectively. Also, antimetabolite resistance can be used as the basis of selection for the following genes: dhfr, which confers resistance to methotrexate (Wigler et al., 1980, Natl. Acad. Sci. USA 77:357; O'Hare et al., 1981, Proc. Natl. Acad. Sci. USA 78:1527); gpt, which confers resistance to mycophenolic acid (Mulligan & Berg, 1981, Proc. Natl. Acad. Sci. USA 78:2072); neo, which confers resistance to the aminoglycoside G-418 (Wu and Wu, 1991, Biotherapy 3:87-95; Tolstoshev, 1993, Ann. Rev. Pharmacol. Toxicol. 32:573-596; Mulligan, 1993, Science 260:926-932; and Morgan and Anderson, 1993, Ann. Rev. Biochem. 62: 191-217; May, 1993, TIB TECH 11(5):155-215); and hygro, which confers resistance to hygromycin (Santerre et al., 1984, Gene 30:147). Methods commonly known in the art of recombinant DNA technology may be routinely applied to select the desired recombinant clone, and such methods are described, for example, in Ausubel et al. (eds.), Current Protocols in Molecular Biology, John Wiley & Sons, NY (1993); Kriegler, Gene Transfer and Expression, A Laboratory Manual, Stockton Press, NY (1990); and in Chapters 12 and 13, Dracopoli et al. (eds), Current Protocols in Human Genetics, John Wiley & Sons, NY (1994); Colberre-Garapin et al., 1981, J. Mol. Biol. 150:1, which are incorporated by reference herein in their entireties.

[0348] The expression levels of an antibody molecule can be increased by vector amplification (for a review, see Bebbington and Hentschel, The use of vectors based on gene amplification for the expression of cloned genes in mammalian cells in DNA cloning, Vol.3. (Academic Press, New York, 1987)). When a marker in the vector system expressing antibody is amplifiable, increase in the level of inhibitor present in culture of host cell will increase the number of copies of the marker gene. Since the amplified region is associated with the antibody gene, production of the antibody will also increase (Crouse et al., 1983, Mol. Cell. Biol. 3:257).

[0349] The host cell may be co-transfected with two expression vectors of the invention, the first vector encoding a heavy chain derived polypeptide and the second vector encoding a light chain derived polypeptide. The two vectors may contain identical selectable markers which enable equal expression of heavy and light chain polypeptides. Alternatively, a single vector may be used which encodes, and is capable of expressing, both heavy and light chain polypeptides. In such situations, the light chain should be placed before the heavy chain to avoid an excess of toxic free heavy chain (Proudfoot, 1986, Nature 322:52; and Kohler, 1980, Proc. Natl. Acad. Sci. USA 77:2 197). The coding sequences for the heavy and light chains may comprise cDNA or genomic DNA.

[0350] Once an antibody molecule to be used with the methods of the invention has been produced by recombinant expression, it may be purified by any method known in the art for purification of an immunoglobulin molecule, for example, by chromatography (e.g., ion exchange, affinity, particularly by affinity for the specific antigen after Protein A, and sizing column chromatography), centrifugation, differential solubility, or by any other standard technique for the purification of proteins. Further, the antibodies of the present invention or fragments thereof may be fused to heterologous polypeptide sequences described herein or otherwise known in the art to facilitate purification.

[0351] 4.1.4 BiTE Technology

[0352] In certain embodiments, antibodies to be used with the methods of the invention and antibodies of the pharmaceutical compositions of the invention are bispecific T cell engagers (BiTEs). Bispecific T cell engagers (BiTE) are bispecific antibodies that can redirect T cells for antigen-specific elimination of targets. A BiTE molecule has an antigen-binding domain that binds to a T cell antigen (e.g. CD3) at one end of the molecule and an antigen binding domain that will bind to an antigen on the target cell. A BiTE molecule was recently described in WO 99/54440, which is herein incorporated by reference. This publication describes a novel single-chain multifunctional polypeptide that comprises binding sites for the CD19 and CD3 antigens (CD19×CD3). This molecule was derived from two antibodies, one that binds to CD19 on the B cell and an antibody that binds to CD3 on the T cells. The variable regions of these different antibodies are linked by a polypeptide sequence, thus creating a single molecule. Also described, is the linking of the variable heavy chain (VH) and light chain (VL) of a specific binding domain with a flexible linker to create a single chain, bispecific antibody.

[0353] In an embodiment of this invention, an antibody or a fragment thereof that immunospecifically binds a polypeptide of interest (e.g., an antigen of MPV, RSV and/or PIV) will comprise a portion of the BiTE molecule. For example, the VH and/or VL (preferably a scFV) of an antibody that binds a polypeptide of interest (e.g., an antigen of MPV, RSV and/or PIV) can be fused to an anti-CD3 binding portion such as that of the molecule described above, thus creating a BiTE molecule that targets the polypeptide of interest (e.g., an antigen of MPV, RSV and/or PIV). In addition to the variable heavy and or light chain of antibody against a polypeptide of interest (e.g., an antigen of MPV, RSV and/or PIV), other molecules that bind the polypeptide of interest (e.g., an antigen of MPV, RSV and/or PIV) can comprise the BiTE molecule, for example antiviral compounds. In another embodiment, the BiTE molecule can comprise a molecule that binds to other T cell antigens (other than CD3). For example, ligands and/or antibodies that immunospecifically bind to T-cell antigens like CD2, CD4, CD8, CD11a, TCR, and CD28 are contemplated to be part of this invention. This list is not meant to be exhaustive but only to illustrate that other molecules that can immunospecifically bind to a T cell antigen can be used as part of a BiTE molecule. These molecules can include the VH and/or VL portions of the antibody or natural ligands (for example LFA3 whose natural ligand is CD3). A BiTE molecule can be an antagonist.

[0354] The “binding domain” as used in accordance with the present invention denotes a domain comprising a three-dimensional structure capable of specifically binding to an epitope like native antibodies, free scFv fragments or one of their corresponding immunoglobulin chains, preferably the VH chain. Thus, said domain can comprise the VH and/or VL domain of an antibody or an immunoglobulin chain, preferably at least the VH domain or more preferably the VH and VL domain linked by a flexible polypeptide linker (scFv). On the other hand, said binding domain contained in the polypeptide of interest may comprise at least one complementarity determining region (CDR) of an antibody or immunoglobulin chain recognizing an antigen on the T cell or a cellular antigen. In this respect, it is noted that the binding domain present in the polypeptide of interest may not only be derived from antibodies but also from other T cell or cellular antigen binding protein, such as naturally occurring surface receptors or ligands. It is further contemplated that in an embodiment of the invention, said first and or second domain of the above-described polypeptide mimic or correspond to a VH and VL region from a natural antibody. The antibody providing the binding site for the polypeptide of interest can be, e.g., a monoclonal antibody, polyclonal antibody, chimeric antibody, humanized antibody, bispecific antibody, synthetic antibody, antibody fragment, such as Fab, Fv or scFv fragments etc., or a chemically modified derivative of any of these.

[0355] 4.1.5 Antibody Conjugates

[0356] In certain embodiments, the antibodies to be used with the methods of the invention or fragments thereof are recombinantly fused or chemically conjugated (including both covalently and non-covalently conjugations) to a heterologous polypeptide (or portion thereof, preferably at least 10, at least 20, at least 30, at least 40, at least 50, at least 60, at least 70, at least 80, at least 90 or at least 100 amino acids of the polypeptide) to generate fusion proteins. The fusion does not necessarily need to be direct, but may occur through linker sequences. For example, antibodies may be used to target heterologous polypeptides to particular cell types (e.g., respiratory epithelial cells), either in vitro or in vivo, by fusing or conjugating the antibodies to antibodies specific for particular cell surface receptors. Antibodies fused or conjugated to heterologous polypeptides may also be used in in vitro immunoassays and purification methods using methods known in the art. See e.g., PCT publication WO 93/21232; EP 439,095; Naramura et al., Immunol. Lett. 39:91-99 (1994); U.S. Pat. No. 5,474,981; Gillies et al., PNAS 89:1428-1432 (1992); and Fell et al., J. Immunol. 146:2446-2452(1991), which are incorporated by reference in their entireties.

[0357] In certain embodiments, the anti-RSV-antigen antibody is an antibody conjugate. In other embodiments, the anti-PIV-antigen antibody is an antibody conjugate. In other embodiments, the anti-hMPV-antigen antibody is an antibody conjugate.

[0358] Additional fusion proteins of the antibodies to be used with the methods of the invention or fragments thereof may be generated through the techniques of gene-shuffling, motif-shuffling, exon-shuffling, and/or codon-shuffling (collectively referred to as “DNA shuffling”). DNA shuffling may be employed to alter the activities of antibodies of the invention or fragments thereof (e.g., antibodies or antigen-binding fragments thereof with higher affinities and lower dissociation rates). See, generally, U.S. Pat. Nos. 5,605,793; 5,811,238; 5,830,721; 5,834,252; and 5,837,458, and Patten et al., Curr. Opinion Biotechnol. 8:724-33 (1997); Harayama, Trends Biotechnol. 16(2):76-82 (1998); Hansson, et al., J. Mol. Biol. 287:265-76 (1999); and Lorenzo and Blasco, Biotechniques 24(2):308-13 (1998) (each of these patents and publications are hereby incorporated by reference in its entirety). In one embodiment, antibodies or antigen-binding fragments thereof, or the encoded antibodies or antigen-binding fragments thereof, may be altered by being subjected to random mutagenesis by error-prone PCR, random nucleotide insertion or other methods prior to recombination. In another embodiment, one or more portions of a polynucleotide encoding an antibody or antibody fragment, which portions immunospecifically bind to a RSV, PIV, and/or hMPV antigen may be recombined with one or more components, motifs, sections, parts, domains, fragments, etc. of one or more heterologous molecules.

[0359] Moreover, the antibodies to be used with the methods of the present invention or fragments thereof can be fused to marker sequences, such as a peptide to facilitate purification. In preferred embodiments, the marker amino acid sequence is a hexa-histidine peptide, such as the tag provided in a pQE vector (QIAGEN, Inc., 9259 Eton Avenue, Chatsworth, Calif., 91311), among others, many of which are commercially available. As described in Gentz et al., 1989, Proc. Natl. Acad. Sci. USA 86:821-824, for instance, hexa-histidine provides for convenient purification of the fusion protein. Other peptide tags useful for purification include, but are not limited to, the hemagglutinin “HA” tag, which corresponds to an epitope derived from the influenza hemagglutinin protein (Wilson et al., 1984, Cell 37:767) and the “flag” tag.

[0360] An antibody or fragment thereof may be conjugated to a therapeutic moiety such as, but not limited to, a cytotoxin, e.g., a cytostatic or cytocidal agent, a therapeutic agent or a radioactive metal ion, e.g., alpha-emitters. A cytotoxin or cytotoxic agent includes, but is not limited to, any agent that is detrimental to cells. Examples include, but are not limited to, paclitaxol, cytochalasin B, gramicidin D, ethidium bromide, emetine, mitomycin, etoposide, tenoposide, vincristine, vinblastine, colchicin, doxorubicin, daunorubicin, dihydroxy anthracin dione, mitoxantrone, mithramycin, actinomycin D, 1-dehydrotestosterone, glucocorticoids, procaine, tetracaine, lidocaine, propranolol, and puromycin and analogs or homologs thereof. Therapeutic agents include, but are not limited to, antimetabolites (e.g., methotrexate, 6-mercaptopurine, 6-thioguanine, cytarabine, 5-fluorouracil decarbazine), alkylating agents (e.g., mechlorethamine, thioepa chlorambucil, melphalan, carmustine (BSNU) and lomustine (CCNU), cyclothosphamide, busulfan, dibromomannitol, streptozotocin, mitomycin C, and cis-dichlorodiamine platinum (II) (DDP) cisplatin), anthracyclines (e.g., daunorubicin (formerly daunomycin) and doxorubicin), antibiotics (e.g., dactinomycin (formerly actinomycin), bleomycin, mithramycin, and anthramycin (AMC)), anti-mitotic agents (e.g., vincristine and vinblastine), and antivirals, such as, but not limited to: nucleoside analogs, such as zidovudine, acyclovir, gangcyclovir, vidarabine, idoxuridine, trifluridine, and ribavirin, as well as foscamet, amantadine, rimantadine, saquinavir, indinavir, ritonavir, and the alpha-interferons.

[0361] Further, an antibody to be used with the methods of the invention or fragment thereof may be conjugated to a therapeutic agent or drug moiety that modifies a given biological response. Therapeutic agents or drug moieties are not to be construed as limited to classical chemical therapeutic agents. For example, the drug moiety may be a protein or polypeptide possessing a desired biological activity. Such proteins may include, but are not limited to, a toxin such as abrin, ricin A, pseudomonas exotoxin, or diphtheria toxin; a protein such as tumor necrosis factor, α-interferon, β-interferon, nerve growth factor, platelet derived growth factor, tissue plasminogen activator, an apoptotic agent, e.g., TNF-α, TNF-β, AIM I (see, International Publication No. WO 97/33899), AIM II (see, International Publication No. WO 97/34911), Fas Ligand (Takahashi et al., 1994, J. Iminunol., 6:1567-1574), and VEGI (see, International Publication No. WO 99/23105), a thrombotic agent or an anti-angiogenic agent, e.g., angiostatin or endostatin; or, a biological response modifier such as, for example, a lymphokine (e.g., interleukin-1 (“IL-1”), interleukin-2 (“IL-2”), interleukin-6 (“IL-6”), granulocyte macrophage colony stimulating factor (“GM-CSF”), and granulocyte colony stimulating factor (“G-CSF”)), or a growth factor (e.g., growth hormone (“GH”)).

[0362] Techniques for conjugating such therapeutic moieties to antibodies are well known, see, e.g., Arnon et al., “Monoclonal Antibodies For Immunotargeting Of Drugs In Cancer Therapy”, in Monoclonal Antibodies And Cancer Therapy, Reisfeld et al. (eds.), pp. 243-56 (Alan R. Liss, Inc. 1985); Hellstrom et al., “Antibodies For Drug Delivery”, in Controlled Drug Delivery (2nd Ed.), Robinson et al. (eds.), pp. 623-53 (Marcel Dekker, Inc. 1987); Thorpe, “Antibody Carriers Of Cytotoxic Agents In Cancer Therapy: A Review”, in Monoclonal Antibodies '84: Biological And Clinical Applications, Pinchera et al. (eds.), pp. 475-506 (1985); “Analysis, Results, And Future Prospective Of The Therapeutic Use Of Radiolabeled Antibody In Cancer Therapy”, in Monoclonal Antibodies For Cancer Detection And Therapy, Baldwin et al. (eds.), pp. 303-16 (Academic Press 1985), and Thorpe et al., 1982, Immunol. Rev. 62:119-58.

[0363] An antibody or fragment thereof, with or without a therapeutic moiety conjugated to it, administered alone or in combination with cytotoxic factor(s) and/or cytokine(s) can be used as a therapeutic.

[0364] Alternatively, an antibody can be conjugated to a second antibody to form an antibody heteroconjugate as described by Segal in U.S. Pat. No. 4,676,980, which is incorporated herein by reference in its entirety.

[0365] Antibodies may also be attached to solid supports, which are particularly useful for immunoassays or purification of the target antigen. Such solid supports include, but are not limited to, glass, cellulose, polyacrylamide, nylon, polystyrene, polyvinyl chloride or polypropylene.

[0366] 4.1.6 Anti-RSV-Antigen Antibodies

[0367] Anti-RSV-antigen antibodies that can be used with the methods of the invention bind immunospecifically to an antigen of RSV. In certain embodiments, the anti-RSV-antigen antibody binds immunospecifically to an RSV antigen of the Group A of RSV. In certain embodiments, the anti-RSV-antigen antibody binds immunospecifically to an RSV antigen of the Group B of RSV. In certain embodiments, an antibody binds to an antigen of RSV of one Group and cross reacts with the analogous antigen of the other Group.

[0368] In certain embodiments, an anti-RSV-antigen antibody binds immunospecifically to a RSV nucleoprotein, RSV phosphoprotein, RSV matrix protein, RSV small hydrophobic protein, RSV RNA-dependent RNA polymerase, RSV F protein, and/or RSV G protein.

[0369] In certain embodiments, an anti-RSV-antigen antibody binds to allelic variants of a RSV nucleoprotein, a RSV phosphoprotein, a RSV matrix protein, a RSV small hydrophobic protein, a RSV RNA-dependent RNA polymerase, a RSV F protein, and/or a RSV G protein.

[0370] In certain embodiments, the anti-RSV-antigen antibody binds immunospecifically to, inter alia, an RSV attachment glycoprotein, e.g., having an amino acid sequence of SEQ ID NO:390; a RSV fusion glycoprotein, e.g., having an amino acid sequence of SEQ ID NO:391; a RSV small hydrophobic protein, e.g., having an amino acid sequence of SEQ ID NO:392; a RSV RNA polymerase beta subunit (Large structural protein) (L protein), e.g., having an amino acid sequence of SEQ ID NO:393; a RSV phosphoprotein P, e.g., having an amino acid sequence of SEQ ID NO:394; an RSV attachment glycoprotein G, e.g., having an amino acid sequence of SEQ ID NO:395; a RSV nucleocapsid protein, e.g. having an amino acid sequence of SEQ ID NO:396; a RSV nucleoprotein (N), e.g., having an amino acid sequence of SEQ ID NO:397; and/or a RSV matrix protein, e.g., having an amino acid sequence of SEQ ID NO:398.

[0371] In certain embodiments, the anti-RSV-antigen antibody binds immunospecifically to a protein/polypeptide that consists of an amino acid sequence that is at least 60%, 70%, 80%, 90%, 95%, or at least 98% identical to the amino acid sequence of the attachment glycoprotein of SEQ ID NO:390; the fusion glycoprotein of SEQ ID NO:391; the small hydrophobic protein of SEQ ID NO:392; the RNA polymerase beta subunit (Large structural protein) (L protein) of SEQ ID NO:393; the phosphoprotein P of SEQ ID NO:394; the attachment glycoprotein G of SEQ ID NO:395; the nucleocapsid protein of SEQ ID NO:396; the nucleoprotein (N)of SEQ ID NO:397; and/or the matrix protein of SEQ ID NO:398. In certain embodiments, the anti-RSV-antigen antibody binds immunospecifically to a protein/polypeptide that consists of an amino acid sequence that is at most 70%, 80%, 90%, 95%, 98% or at most 100% identical to the amino acid sequence of the attachment glycoprotein of SEQ ID NO:390; the fusion glycoprotein of SEQ ID NO:391; the small hydrophobic protein of SEQ ID NO:392; the RNA polymerase beta subunit (Large structural protein) (L protein) of SEQ ID NO:393; the phosphoprotein P of SEQ ID NO:394; the attachment glycoprotein G of SEQ ID NO:395; the nucleocapsid protein of SEQ ID NO:396; the nucleoprotein (N) of SEQ ID NO:397; and/or the matrix protein of SEQ ID NO:398.

[0372] In certain embodiments, the anti-RSV-antigen antibodies are the anti-RSV-antigen antibodies of or are prepared by the methods of U.S. application Ser. No. 09/724,531, filed Nov. 28, 2000; Ser. No. 09/996,288, filed Nov. 28, 2001; and Ser. No. 09/996,265, filed Nov. 28, 2001, all entitled “Methods of Administering/Dosing Anti-RSV Antibodies for Prophylaxis and Treatment”, by Young et al., which are incorporated by reference herein in their entireties. Methods and composition for stabilized antibody formulations that can be used in the methods of the present invention are disclosed in U.S. Provisional Application Nos.: 60/388,921, filed Jun. 14, 2002, and 60/388,920, filed Jun. 14, 2002, which are incorporated by reference herein in their entireties.

[0373] In certain embodiments, the one or more antibodies or antigen-binding fragments thereof that bind immunospecifically to a RSV antigen comprise a Fc domain with a higher affinity for the FcRn receptor than the Fc domain of SYNAGIS® (Palivizumab). Such antibodies are described in U.S. patent application Ser. No. 10/020,354, filed Dec. 12, 2001, which is incorporated herein by reference in its entireties.

[0374] In certain embodiments, the one or more anti-RSV-antigen antibodies include, but are not limited to, SYNAGIS® (Palivizumab). In certain embodiments, the one or more anti-RSV-antigen antibodies include, but are not limited to, A4B4 (see section 4.1.5). In certain specific embodiments, the anti-RSV-antigen antibody is AFFF; P12f2 P12f4; P11d4; Ale9; A12a6; A13c4; A17d4; A4B4; 1X-493L1; FR H3-3F4; M3H9; Y10H6; DG; AFFF(1); 6H8; L1-7E5; L2-15B10; A13a11; A1h5; A4B4(1);A4B4-F52S; or A4B4L1FR-S28R. These antibodies are disclosed in International Application Publication No.: WO 02/43660, entitled “Methods of Administering/Dosing Anti-RSV Antibodies for Prophylaxis and Treatment”, by Young et al., which is incorporated herein by reference in its entirety.

[0375] In certain embodiments, the one or more antibodies that bind to a RSV antigen has a higher avidity and/or affinity for a RSV antigen than SYNAGIS® has for the RSV F glycoprotein. In certain embodiments, the one or more antibodies that bind immunospecifically to a RSV antigen has a higher affinity and/or avidity for a RSV antigen than any previously known anti-RSV-antigen specific antibodies or antigen-binding fragments thereof. In certain embodiments, anti-RSV-antigen antibody is not SYNAGIS®.

[0376] For the methods of the present invention, antibodies or antigen-binding fragments thereof which immunospecifically bind to a RSV antigen with an affinity constant of at least 2×10⁸ M⁻¹, at least 2.5×10⁸ M⁻¹, at least 5×10⁸ M⁻¹, at least 10⁹ M⁻¹, at least 5×10⁹ M⁻¹, at least 10¹⁰ M⁻¹, at least 5×10¹⁰ M⁻¹, at least 10¹¹ M⁻¹, at least 5×10 ¹¹ M⁻¹, at least 10¹² M⁻¹, at least 5×10¹² M⁻¹, at least 10¹³ M⁻¹, at least 5×10¹³ M⁻¹, at least 10¹⁴ M⁻¹, at least 5×10¹⁴ M⁻¹, at least 10¹⁵ M⁻¹, or at least 5×10¹⁵ M⁻¹ can be used. In a specific embodiment, the antibody that binds immunospecifically to a RSV antigen is SYNAGIS®, which binds to the RSV F glycoprotein. The present invention also provides pharmaceutical compositions comprising (i) one or more antibodies which immunospecifically bind to a RSV antigen with an affinity constant of at least 2×10⁸ M⁻¹, at least 2.5×10⁸ M⁻¹, at least 5×10⁸ M⁻¹, at least 10⁹ M⁻¹, at least 5×10⁹ M⁻¹, at least 10¹⁰ M⁻¹, at least 5×10¹⁰ M⁻¹, at least 10¹¹ M⁻¹, at least 5×10¹¹ M⁻¹, at least 10¹² M⁻¹, at least 5×10¹² M⁻¹, at least 10¹³ M⁻¹, at least 5×10¹³ M⁻¹, at least 10¹⁴ M⁻¹, at least 5×10¹⁴ M⁻¹, at least 10¹⁵ M⁻¹, or at least 5×10¹⁵ M⁻¹ and (ii) one or more antibodies which immunospecifically bind to a RSV antigen with an affinity constant of at least 2×10⁸ M⁻¹, at least 2.5×10⁸ M⁻¹, at least 5×10⁸ M⁻¹, at least 10⁹ M⁻¹, at least 5×10⁹ M⁻¹, at least 10¹⁰ M⁻¹, at least 5×10¹⁰ M⁻¹, at least 10¹¹ M⁻¹, at least 5×10¹¹ M⁻¹, at least 10¹² M⁻¹, at least 5×10¹² M⁻¹, at least 10¹³ M⁻¹, at least 5×10¹³ M⁻¹, at least 10¹⁴ M⁻¹, at least 5×10¹⁴M⁻¹, at least 10¹⁵ M⁻¹, or at least 5×10¹⁵ M⁻¹.

[0377] It should be recognized that antibodies that immunospecifically bind to a RSV antigen are known in the art. For example, SYNAGIS® is a humanized monoclonal antibody presently used for the prevention of RSV infection in pediatric patients. In a specific embodiment, an antibody to be used with the methods of the present invention is SYNAGIS® or an antibody-binding fragment thereof (e.g., contains one or more complementarity determining regions (CDRs) and preferably, the variable domain of SYNAGIS®). The amino acid sequence of SYNAGIS® is disclosed, e.g., in Johnson et al., 1997, J. Infectious Disease 176:1215-1224, and U.S. Pat. No. 5,824,307 and International Application Publication No.: WO 02/43660, entitled “Methods of Administering/Dosing Anti-RSV Antibodies for Prophylaxis and Treatment”, by Young et al., which are incorporated herein by reference in their entireties.

[0378] In certain embodiments, the antibodies to be used with the methods and compositions of the invention or fragments thereof bind immunospecifically to one or more RSV antigens regardless of the strain of RSV. In particular, the anti-RSV-antigen antibodies bind to an antigen of human RSV A and human RSV B. In certain embodiments, the anti-RSV-antigen antibodies bind to RSV antigens from one strain of RSV versus another RSV strain. In particular, the anti-RSV-antigen antibody binds to an antigen of human RSV A and not to human RSV B or vice versa. In a specific embodiment, the antibodies or antigen-binding fragments thereof immunospecifically bind to the RSV F glycoprotein, G glycoprotein or SH protein. In certain embodiments, the anti-RSV-antigen antibodies bind immunospecifically to the RSV F glycoprotein. In another preferred embodiment, the anti-RSV-antigen antibodies or antigen-binding fragments thereof bind to the A, B, C, I, II, IV, V, or VI antigenic sites of the RSV F glycoprotein (see, e.g., Lopez et al., 1998, J. Virol. 72:6922-6928, which is incorporated herein by reference in its entirety). In certain embodiments, the anti-RSV-antigen antibodies bind to a RSV nucleoprotein, a RSV phosphoprotein, a RSV matrix protein, a RSV small hydrophobic protein, a RSV RNA-dependent RNA polymerase, a RSV F protein, or a RSV G protein.

[0379] In certain embodiments, the anti-RSV-antigen antibodies or antigen-binding fragments thereof have a high binding affinity for one or more RSV antigens. In a specific embodiment, an anti-RSV antibody or an antigen-binding fragment thereof has an association rate constant or kₒₙ rate (antibody (Ab)+antigen (Ag)^{k}^{ₒₙ}→Ab−Ag)<|<BOX1>|> of at least 10⁵ M⁻¹s⁻¹, at least 5×10⁵ M⁻¹s⁻¹, at least 10⁶M⁻¹s⁻¹, at least 5×10⁶M⁻¹s⁻¹, at least 10⁷ M⁻¹s⁻¹, at least 5×10⁷ M⁻¹s⁻¹, or at least 10⁸ M⁻¹s⁻¹. In a preferred embodiment, an antibody of the present invention or fragment thereof has a kₒₙ of at least 2×10⁵ M⁻¹s⁻¹, at least 5×10⁵ M⁻¹s⁻¹, at least 10⁶ M⁻¹s⁻¹, at least 5×10⁶ M⁻¹s⁻¹, at least 10⁷ M⁻¹s⁻¹, at least 5×10⁷ M⁻¹s⁻¹, or at least 10⁸ M⁻¹s⁻¹.

[0380] In another embodiment, anti-RSV-antigen antibodies or fragment thereof has a k_{off} rate (antibody (Ab)+antigen) of less than 10⁻¹ s⁻¹, less than 5×10⁻¹ s⁻¹, less than 10⁻² s⁻¹, less than 5×10⁻² s⁻¹, less than 10⁻³ s⁻¹, less than 5×10⁻³ s⁻¹, less than 10⁻⁴ s⁻¹, less than 5×10⁻⁴ s⁻¹, less than 10⁻⁵ s⁻¹, less than 5×10⁻⁵ s⁻¹, less than 10⁻⁶ s⁻¹, less than 5×10⁻⁶ s⁻¹, less than 10⁻⁷ s⁻¹, less than 5×10⁻⁷ s⁻¹, less than 10⁻⁸ s⁻¹, less than 5×10⁻⁸ s⁻¹, less than 10⁻⁹ s⁻¹, less than 5×10⁻⁹ s⁻¹, or less than 10⁻¹⁰ s⁻¹. In a preferred embodiment, an anti-RSV-antigen antibodies or fragment thereof has a kₒₙ of less than 5×10⁻⁴ s⁻¹ less than 10⁻⁵ s⁻¹, less than 5×10⁻⁵ s⁻¹, less than 10⁻⁶ s⁻¹, less than 5×10⁻⁶ s⁻¹, less than 10⁻⁷ s⁻¹, less than 5×10⁻⁷ s⁻¹, less than 10⁻⁸ s⁻¹, less than 5×10⁻⁸ s⁻¹, less than 10⁻⁹ s⁻¹, less than 5×10⁻⁹ s⁻¹, or less than 10⁻¹⁰ s⁻¹.

[0381] In certain embodiments, the antibodies to be used with the methods of the invention or fragments thereof comprise the amino acid sequence of SYNAGIS® with one or more amino acid residue substitutions in one or more VL CDRs and/or one or more VH CDRs. In a specific embodiment, an antibody to be used with the methods of the invention comprises the amino acid sequence of SYNAGIS® with one or more amino acid residue substitutions of the amino acid residues indicated in bold face and underlining in Table 3. In accordance with this embodiment, the amino acid residue substitutions can be conservative or non-conservative. The antibody or antibody fragment generated by introducing substitutions in the VH domain, VH CDRs, VL domain and/or VL CDRs of SYNAGIS® can be tested in vitro and in vivo, for example, for its ability to bind to RSV F antigen, for its ability to neutralize RSV, or for its ability to prevent, treat or ameliorate one or more symptoms associated with a RSV infection.

TABLE 3
CDR Sequences Of SYNAGIS ®

| CDR | Sequence |
|---|---|
| VH1 | TSGMSVG |
| VH2 | DIWWDDKKDYNPSLKS |
| VH3 | SMITNWYFDV |
| VL1 | KCQLSVGYMH |
| VL2 | DTSKLAS |
| VL3 | FQGSGYPFT |

Bold faced & underlined amino acid residues are preferred residues which should be substituted.

[0382] In certain specific embodiments, the amino acid sequences of the different domains of one or more anti-RSV-antigen antibodies are as follows: VH Domain: SEQ ID NO:422; VH CDR1: TAGMSVG; VH CDR2: DIWWDDKKHYNPSLKD; VH CDR3: DMIFNFYFDV; VL Domain: SEQ ID NO:423; VL CDR1: SASSRVGYMH; VL CDR2: DTLLLDS; VL CDR3: FQGSGYPFT. This antibody has been disclosed as A4B4(1) in International Application Publication No.: WO 02/43660, entitled “Methods of Administering/Dosing Anti-RSV Antibodies for Prophylaxis and Treatment”, by Young et al., which is incorporated by reference herein in its entirety.

[0383] In certain specific embodiments, the anti-RSV-antigen antibody is AFFF; P12f2 P12f4; P11d4; Ale9; A12a6; A13c4; A17d4; A4B4; 1X-493L1; FR H3-3F4; M3H9; Y10H6; DG; AFFF(1); 6H8; L1-7E5; L2-15B10; A13al 1; A1h5; A4B4(1);A4B4-F52S; or A4B4L1FR-S28R. These antibodies are disclosed in International Application Publication No.: WO 02/43660, entitled “Methods of Administering/Dosing Anti-RSV Antibodies for Prophylaxis and Treatment”, by Young et al., which is incorporated herein by reference in its entirety.

[0384] 4.1.7 Anti-hMPV-Antigen Antibodies

[0385] Any antibody that immunospecifically binds to an hMPV or to a protein of hMPV or a fragment, an analog, a derivative or a homolog thereof can be used with the methods of the invention. Mammalian MPV and proteins of mammalian MPV and homologs thereof are described in section 4.1.7.1.

[0386] 4.1.7.1 hMPV

[0387] Structural Characteristics of a Mammalian Metapneumovirus

[0388] A Mammalian MPV is a negative-sense single stranded RNA virus belonging to the sub-family Pneumovirinae of the family Paramyxoviridae. Moreover, the mammalian MPV is identifiable as phylogenetically corresponding to the genus Metapneumovirus, wherein the mammalian MPV is phylogenetically more closely related to a virus isolate deposited as I-2614 with CNCM, Paris (SEQ ID NO: 19) than to turkey rhinotracheitis virus, the etiological agent of avian rhinotracheitis. A virus is identifiable as phylogenetically corresponding to the genus Metapneumovirus by, e.g., obtaining nucleic acid sequence information of the virus and testing it in phylogenetic analyses. Any technique known to the skilled artisan can be used to determine phylogenetic relationships between strains of viruses. Other techniques are disclosed in International Patent Application PCT/NL02/00040, published as WO 02/057302, which is incorporated by reference in its entirety herein. In particular, PCT/NL02/00040 discloses nucleic acid sequences that are suitable for phylogenetic analysis at page 12, line 27 to page 19, line 29, which are incorporated by reference herein. A virus can further be identified as a mammalian MPV on the basis of sequence similarity as described in more detail below.

[0389] In a specific embodiment, the mammalian MPV is a human MPV.

[0390] In addition to phylogenetic relatedness and sequence similarity of a virus to a mammalian MPV as disclosed herein, the similarity of the genomic organization of a virus to the genomic organization of a mammalian MPV disclosed herein can also be used to identify the virus as a mammalian MPV. In certain embodiments, the genomic organization of a mammalian MPV is different from the genomic organization of pneumoviruses within the sub-family Pneumovirinae of the family Paramyxoviridae. The classification of the two genera, metapneumovirus and pneumovirus, is based primarily on their gene constellation; metapneumoviruses generally lack non-structural proteins such as NS1 or NS2 (see also Randhawa et al., 1997, J. Virol. 71:9849-9854) and the gene order is different from that of pneumoviruses (RSV: ‘3-NS1-NS2-N-P-M-SH-G-F-M2-L-5’, APV: ‘3-N-P-M-F-M2-SH-G-L-5’) (Lung, et al., 1992, J. Gen. Virol. 73:1709-17 15; Yu, et al., 1992, Virology 186:426-434; Randhawa, et al., 1997, J. Virol. 71:9849-9854).

[0391] Further, a mammalian MPV of the invention can be identified by its immunological properties. In certain embodiments, specific anti-sera can be raised against mammalian MPV that can neutralize mammalian MPV. Monoclonal and polyclonal antibodies can be raised against MPV that can also neutralize mammalian MPV. (See, WO 02/057302, which is incorporated by reference herein.

[0392] The mammalian MPV of the invention is further characterized by its ability to infect a mammalian host, i.e., a mammalian cultured cell or a mammal. Unlike APV, mammalian MPV does not replicate or replicates only at low levels in chickens and turkeys. Mammalian MPV replicates, however, in mammalian hosts, such as cynomolgous macaques. In certain, more specific, embodiments, a mammalian MPV is further characterized by its ability to replicate in a mammalian host. In certain, more specific embodiments, a mammalian MPV is further characterized by its ability to cause the mammalian host to express proteins encoded by the genome of the mammalian MPV. In even more specific embodiments, the viral proteins expressed by the mammalian MPV are inserted into the cytoplasmic membranes of the mammalian host. In certain embodiments, the mammalian MPV of the invention can infect a mammalian host and cause the mammalian host to produce new infectious viral particles of the mammalian MPV. For a more detailed description of the functional characteristics of the mammalian MPV of the invention, see below.

[0393] In certain embodiments, the appearance of a virus in an electron microscope or its sensitivity to chloroform can be used to identify the virus as a mammalian MPV. The mammalian MPV of the invention appears in an electron microscope as paramyxovirus-like particle. Consistently, a mammalian MPV is sensitive to treatment with chloroform; a mammalian MPV is cultured optimally on tMK cells or cells functionally equivalent thereto and it is essentially trypsine dependent in most cell cultures. Furthermore, a mammalian MPV has a typical cytopathic effects (CPE) and lacks haemagglutinating activity against species of red blood cells. The CPE induced by MPV isolates are similar to the CPE induced by hRSV, with characteristic syncytia formation followed by rapid internal disruption of the cells and subsequent detachment from the culture plates. Although most paramyxoviruses have haemagglutinating activity, most of the pneumoviruses do not (Pringle, C. R. In: The Paramyxoviruses; (ed. D. W. Kingsbury) 1-39 (Plenum Press, New York, 1991)). A mammalian MPV contains a second overlapping ORF (M2-2) in the nucleic acid fragment encoding the M2 protein. The occurrence of this second overlapping ORF occurs in other pneumoviruses as shown in Ahmadian et al., 1999, J. Gen. Vir. 80:2011-2016.

[0394] In certain embodiments, a viral isolate can be identified as a mammalian MPV by the following method. A test sample can, e.g., be obtained from an animal or human. The sample is then tested for the presence of a virus of the sub-family Pneumovirinae. If a virus of the sub-family Pneumovirinae is present, the virus can be tested for any of the characteristics of a mammalian MPV as discussed herein, such as, but not limited to, phylogenetic relatedness to a mammalian MPV, nucleotide sequence identity to a nucleotide sequence of a mammalian MPV, amino acid sequence identity/homology to a amino acid sequence of a mammalian MPV, and genomic organization. Furthermore, the virus can be identified as a mammalian MPV by cross-hybridization experiments using nucleic acid sequences from a MPV isolate, RT-PCR using primers specific to mammalian MPV, or in classical cross-serology experiments using antibodies directed against a mammalian MPV isolate. In certain other embodiments, a mammalian MPV can be identified on the basis of its immunological distinctiveness, as determined by quantitative neutralization with animal antisera. The antisera can be obtained from, e.g., ferrets, pigs or macaques that are infected with a mammalian MPV.

[0395] In certain embodiments, the serotype does not cross-react with viruses other than mammalian MPV. In other embodiments, the serotype shows a homologous-to-heterologous titer ratio >16 in both directions If neutralization shows a certain degree of cross-reaction between two viruses in either or both directions (homologous-to-heterologous titer ration of eight or sixteen), distinctiveness of serotype is assumed if substantial biophysical/biochemical differences of DNA sequences exist. If neutralization shows a distinct degree of cross-reaction between two viruses in either or both directions (homologous-to-heterologous titer ratio of smaller than eight), identity of serotype of the isolates under study is assumed. Isolate I-2614, herein also known as MPV isolate 00-1 (as deposited with CNCM, Paris (SEQ ID NO:19)), can be used as prototype.

[0396] In certain embodiments, a virus can be identified as a mammalian MPV by means of sequence homology/identity of the viral proteins or nucleic acids in comparison with the amino acid sequence and nucleotide sequences of the viral isolates disclosed herein by sequence or deposit. In particular, a virus is identified as a mammalian MPV when the genome of the virus contains a nucleic acid sequence that has a percentage nucleic acid identity to a virus isolate deposited as I-2614 with CNCM, Paris which is higher than the percentages identified herein for the nucleic acids encoding the L protein, the M protein, the N protein, the P protein, or the F protein as identified herein below in comparison with APV-C (see Table 4). (See, PCT WO 02/05302, at pp. 12 to 19, which is incorporated by reference herein. Without being bound by theory, it is generally known that viral species, especially RNA virus species, often constitute a quasi species wherein the members of a cluster of the viruses display sequence heterogeneity. Thus, it is expected that each individual isolate may have a somewhat different percentage of sequence identity when compared to APV-C.

[0397] The highest amino sequence identity between the proteins of MPV and any of the known other viruses of the same family to date is the identity between APV-C and human MPV. Between human MPV and APV-C, the amino acid sequence identity for the matrix protein is 87%, 88% for the nucleoprotein, 68% for the phosphoprotein, 81% for the fusion protein and 56-64% for parts of the polymerase protein, as can be deduced when comparing the sequences given in FIG. 30, see also Table 4. Viral isolates that contain ORFs that encode proteins with higher homology compared to these maximum values are considered mammalian MPVs. It should be noted that, similar to other viruses, a certain degree of variation is found between different isolated of mammalian MPVs.

TABLE 4
Amino acid sequence identity between the ORFs
of MPV and those of other paramyxoviruses.

| | N | P | M | F | M2-1 | M2-2 | L |
|---|---|---|---|---|---|---|---|
| APV A | 69 | 55 | 78 | 67 | 72 | 26 | 64 |
| APV B | 69 | 51 | 76 | 67 | 71 | 27 | ⁻² |
| APV C | 88 | 68 | 87 | 81 | 84 | 56 | ⁻² |
| hRSVA | 42 | 24 | 38 | 34 | 36 | 18 | 42 |
| hRSV B | 41 | 23 | 37 | 33 | 35 | 19 | 44 |
| bRSV | 42 | 22 | 38 | 34 | 35 | 13 | 44 |
| PVM | 45 | 26 | 37 | 39 | 33 | 12 | ⁻² |
| others³ | 7-11 | 4-9 | 7-10 | 10-18 | ⁻⁴ | ⁻⁴ | 13-14 |

Footnotes:
¹No sequence homologies were found with known G and SH proteins and were thus excluded
²Sequences not available.
³others: human parainfluenza virus type 2 and 3, Sendai virus, measles virus, nipah virus, phocine distemper virus, and New Castle Disease virus.
⁴ORF absent in viral genome.

[0398] Any protein of a mammalian MPV can be used as an immunogen to generate antibodies to be used with the methods of the invention. In certain embodiments, an antibody to be used with the methods of treatment of the present invention bind immunospecifically to a protein of mammlian MPV as set forth below.

[0399] In certain embodiments, the amino acid sequence of the SH protein of the mammalian MPV is at least 30%, at least 35%, at least 40%, at least 45%, at least 50%, at least 55%, at least 60%, at least 65%, at least 70%, at least 75%, at least 80%, at least 85%, at least 90%, at least 95%, at least 98%, at least 99%, or at least 99.5% identical to the amino acid sequence of SEQ ID NO:382 (SH protein of isolate NL/1/00; see Table 5). The isolated negative-sense single stranded RNA metapneumovirus that comprises the SH protein that is at least 30% identical to SEQ ID NO:382 (SH protein of isolate NL/1/00; see Table 5) is capable of infecting a mammalian host. In certain embodiments, the isolated negative-sense single stranded RNA metapneumovirus that comprises the SH protein that is at least 30% identical to SEQ ID NO:382 (SH protein of isolate NL/1/00; see Table 5) is capable of replicating in a mammalian host. In certain embodiments, a mammalian MPV contains a nucleotide sequence that encodes a SH protein that is at least 30% identical to SEQ ID NO:382 (SH protein of isolate NL/1/00; see Table 5).

[0400] In certain embodiments, the amino acid sequence of the G protein of the mammalian MPV is at least 20%, at least 25%, at least 30%, at least 35%, at least 40%, at least 45%, at least 50%, at least 55%, at least 60%, at least 65%, at least 70%, at least 75%, at least 80%, at least 85%, at least 90%, at least 95%, at least 98%, at least 99%, or at least 99.5% identical to the amino acid sequence of SEQ ID NO:322 (G protein of isolate NL/1/00; see Table 5). The isolated negative-sense single stranded RNA metapneumovirus that comprises the G protein that is at least 20% identical to SEQ ID NO:322 (G protein of isolate NL/1/00; see Table 5) is capable of infecting a mammalian host. In certain embodiments, the isolated negative-sense single stranded RNA metapneumovirus that comprises the G protein that is at least 20% identical to SEQ ID NO:322 (G protein of isolate NL/1/00; see Table 5) is capable of replicating in a mammalian host. In certain embodiments, a mammalian MPV contains a nucleotide sequence that encodes a G protein that is at least 20% identical to SEQ ID NO:322 (G protein of isolate NL/1/00; see Table 5).

[0401] In certain embodiments, the amino acid sequence of the L protein of the mammalian MPV is at least 85%, at least 90%, at least 95%, at least 98%, at least 99%, or at least 99.5% identical to the amino acid sequence of SEQ ID NO:330 (L protein of isolate NL/1/00; see Table 5). The isolated negative-sense single stranded RNA metapneumovirus that comprises the L protein that is at least 85% identical to SEQ ID NO:330 (L protein of isolate NL/1/00; see Table 5) is capable of infecting a mammalian host. In certain embodiments, the isolated negative-sense single stranded RNA metapneumovirus that comprises the L protein that is at least 85% identical to SEQ ID NO:330 (L protein of isolate NL/1/00; see Table 5) is capable of replicating in a mammalian host. In certain embodiments, a mammalian MPV contains a nucleotide sequence that encodes a L protein that is at least 20% identical to SEQ ID NO:330 (L protein of isolate NL/1/00; see Table 5).

[0402] In certain embodiments, the amino acid sequence of the N protein of the mammalian MPV is at least 90%, at least 95%, or at least 98% identical to the amino acid sequence of SEQ ID NO:366. The isolated negative-sense single stranded RNA metapneumovirus that comprises the N protein that is at least 90% identical in amino acid sequence to SEQ ID NO:366 is capable of infecting mammalian host. In certain embodiments, the isolated negative-sense single stranded RNA metapneumovirus that comprises the N protein that is 90% identical in amino acid sequence to SEQ ID NO:366 is capable of replicating in a mammalian host. The amino acid identity is calculated over the entire length of the N protein. In certain embodiments, a mammalian MPV contains a nucleotide sequence that encodes a N protein that is at least 90%, at least 95%, or at least 98% identical to the amino acid sequence of SEQ ID NO:366.

[0403] The amino acid sequence of the P protein of the mammalian MPV is at least 70%, at least 80%, at least 90%, at least 95% or at least 98% identical to the amino acid sequence of SEQ ID NO:374. The mammalian MPV that comprises the P protein that is at least 70% identical in amino acid sequence to SEQ ID NO:374 is capable of infecting a mammalian host. In certain embodiments, the mammalian MPV that comprises the P protein that is at least 70% identical in amino acid sequence to SEQ ID NO:374 is capable of replicating in a mammalian host. The amino acid identity is calculated over the entire length of the P protein. In certain embodiments, a mammalian MPV contains a nucleotide sequence that encodes a P protein that is at least 70%, at least 80%, at least 90%, at least 95% or at least 98% identical to the amino acid sequence of SEQ ID NO:374.

[0404] The amino acid sequence of the M protein of the mammalian MPV is at least 90%, at least 95% or at least 98% identical to the amino acid sequence of SEQ ID NO:358. The mammalian MPV that comprises the M protein that is at least 90% identical in amino acid sequence to SEQ ID NO:358 is capable of infecting mammalian host. In certain embodiments, the isolated negative-sense single stranded RNA metapneumovirus that comprises the M protein that is 90% identical in amino acid sequence to SEQ ID NO:358 is capable of replicating in a mammalian host. The amino acid identity is calculated over the entire length of the M protein. In certain embodiments, a mammalian MPV contains a nucleotide sequence that encodes a M protein that is at least 90%, at least 95% or at least 98% identical to the amino acid sequence of SEQ ID NO:358.

[0405] The amino acid sequence of the F protein of the mammalian MPV is at least 85%, at least 90%, at least 95% or at least 98% identical to the amino acid sequence of SEQ ID NO:314. The mammalian MPV that comprises the F protein that is at least 85% identical in amino acid sequence to SEQ ID NO:314 is capable of infecting a mammalian host. In certain embodiments, the isolated negative-sense single stranded RNA metapneumovirus that comprises the F protein that is 85% identical in amino acid sequence to SEQ ID NO:314 is capable of replicating in mammalian host. The amino acid identity is calculated over the entire length of the F protein. In certain embodiments, a mammalian MPV contains a nucleotide sequence that encodes a F protein that is at least 85%, at least 90%, at least 95% or at least 98% identical to the amino acid sequence of SEQ ID NO:314.

[0406] The amino acid sequence of the M2-1 protein of the mammalian MPV is at least 85%, at least 90%, at least 95% or at least 98% identical to the amino acid sequence of SEQ ID NO:338. The mammalian MPV that comprises the M2-1 protein that is at least 85% identical in amino acid sequence to SEQ ID NO:338 is capable of infecting a mammalian host. In certain embodiments, the isolated negative-sense single stranded RNA metapneumovirus that comprises the M2-1 protein that is 85% identical in amino acid sequence to SEQ ID NO:338 is capable of replicating in a mammalian host. The amino acid identity is calculated over the entire length of the M2-1 protein. In certain embodiments, a mammalian MPV contains a nucleotide sequence that encodes a M2-1 protein that is at least 85%, at least 90%, at least 95% or at least 98% identical to the amino acid sequence of SEQ ID NO:338.

[0407] The amino acid sequence of the M2-2 protein of the mammalian MPV is at least 60%, at least 70%, at least 80%, at least 90%, at least 95% or at least 98% identical to the amino acid sequence of SEQ ID NO:346 The isolated mammalian MPV that comprises the M2-2 protein that is at least 60% identical in amino acid sequence to SEQ ID NO:346 is capable of infecting mammalian host. In certain embodiments, the isolated negative-sense single stranded RNA metapneumovirus that comprises the M2-2 protein that is 60% identical in amino acid sequence to SEQ ID NO:346 is capable of replicating in a mammalian host. The amino acid identity is calculated over the entire length of the M2-2 protein. In certain embodiments, a mammalian MPV contains a nucleotide sequence that encodes a M2-1 protein that is is at least 60%, at least 70%, at least 80%, at least 90%, at least 95% or at least 98% identical to the amino acid sequence of SEQ ID NO:346.

[0408] In certain embodiments, the negative-sense single stranded RNA metapneumovirus encodes at least two proteins, at least three proteins, at least four proteins, at least five proteins, or six proteins selected from the group consisting of (i) a N protein with at least 90% amino acid sequence identity to SEQ ID NO:366; (ii) a P protein with at least 70% amino acid sequence identity to SEQ ID NO:374 (iii) a M protein with at least 90% amino acid sequence identity to SEQ ID NO:358 (iv) a F protein with at least 85% amino acid sequence identity to SEQ ID NO:314 (v) a M2-1 protein with at least 85% amino acid sequence identity to SEQ ID NO:338; and (vi) a M2-2 protein with at least 60% amino acid sequence identity to SEQ ID NO:346.

[0409] Mammalian MPV, can be divided into two subgroups, subgroup A and subgroup B, and the two subgroups can each be devided into two variants, A1 and A2, and B1 and B2. A mammalian MPV can be identified as a member of subgroup A if it is phylogenetically closer related to the isolate 00-1 (SEQ ID NO:19) than to the isolate 99-1 (SEQ ID NO:18). A mammalian MPV can be identified as a member of subgroup B if it is phylogenetically closer related to the isolate 99-1 (SEQ ID NO:18) than to the isolate 00-1 (SEQ ID NO:19). In other embodiments, nucleotide or amino acid sequence homologies of individual ORFs can be used to classify a mammalian MPV as belonging to subgroup A or B.

[0410] The different isolates of mammalian MPV can be divided into four different variants, variant A1, variant A2, variant B1 and variant B2 (see FIGS. 21 and 22). The isolate 00-1 (SEQ ID NO: 19) is an example of the variant A1 of mammalian MPV. The isolate 99-1 (SEQ ID NO:18) is an example of the variant B1 of mammalian MPV. A mammalian MPV can be grouped into one of the four variants using a phylogenetic analysis. Thus, a mammalian MPV belongs to a specific variant if it is phylogenetically closer related to a known member of that variant than it is phylogenetically related to a member of another variant of mammalian MPV. The sequence of any ORF and the encoded polypeptide may be used to type a MPV isolate as belonging to a particular subgroup or variant, including N, P, L, M, SH, G, M2 or F polypeptides. In a specific embodiment, the classification of a mammalian MPV into a variant is based on the sequence of the G protein. Without being bound by theory, the G protein sequence is well suited for phylogenetic analysis because of the high degree of variation among G proteins of the different variants of mammalian MPV.

[0411] In certain embodiments of the invention, sequence homology may be determined by the ability of two sequences to hybridize under certain conditions, as set forth below. A nucleic acid which is hybridizable to a nucleic acid of a mammalian MPV, or to its reverse complement, or to its complement can be used in the methods of the invention to determine their sequence homology and identities to each other. In certain embodiments, the nucleic acids are hybridized under conditions of high stringency.

[0412] It is well-known to the skilled artisan that hybridization conditions, such as, but not limited to, temperature, salt concentration, pH, formamide concentration (see, e.g., Sambrook et al., 1989, Chapters 9 to 11, Molecular Cloning, A Laboratory Manual, 2d Ed., Cold Spring Harbor Laboratory Press, Cold Spring Harbor, N.Y., incorporated herein by reference in its entirety). In certain embodiments, hybridization is performed in aqueous solution and the ionic strength of the solution is kept constant while the hybridization temperature is varied dependent on the degree of sequence homology between the sequences that are to be hybridized. For DNA sequences that 100% identical to each other and are longer than 200 basebairs, hybridization is carried out at approximately 15-25° C. below the melting temperature (Tm) of the perfect hybrid. The melting temperature (Tm) can be calculated using the following equation (Bolton and McCarthy, 1962, Proc. Natl. Acad. Sci. USA 84:1390):

Tm=81.5° C.−16.6(log10[Na+])+(% G+C)−0.63(% formamide)−(600/l)

[0413] Wherein (Tm) is the melting temperature, [Na+] is the sodium concentration, G+C is the Guanine and Cytosine content, and l is the length of the hybrid in basepairs. The effect of mismatches between the sequences can be calculated using the formula by Bonner et al. (Bonner et al., 1973, J. Mol. Biol. 81:123-135): for every 1% of mismatching of bases in the hybrid, the melting temperature is reduced by 1-1.5° C.

[0414] Thus, by determining the temperature at which two sequences hybridize, one of skill in the art can estimate how similar a sequence is to a known sequence. This can be done, e.g., by comparison of the empirically determined hybridization temperature with the hybridization temperature calculated for the know sequence to hybridize with its perfect match. Through the use of the formula by Bonner et al., the relationship between hybridization temperature and percent mismatch can be exploited to provide information about sequence similarity.

[0415] By way of example and not limitation, procedures using such conditions of high stringency are as follows. Prehybridization of filters containing DNA is carried out for 8 h to overnight at 65 C in buffer composed of 6×SSC, 50 mM Tris-HCl (pH 7.5), 1 mM EDTA, 0.02% PVP, 0.02% Ficoll, 0.02% BSA, and 500 μg/ml denatured salmon sperm DNA. Filters are hybridized for 48 h at 65 C in prehybridization mixture containing 100 μg/ml denatured salmon sperm DNA and 5-20×106 cpm of ³²P-labeled probe. Washing of filters is done at 37 C for 1 h in a solution containing 2×SSC, 0.01% PVP, 0.01% Ficoll, and 0.01% BSA. This is followed by a wash in 0.1×SSC at 50 C for 45 min before autoradiography. Other conditions of high stringency which may be used are well known in the art. In other embodiments of the invention, hybridization is performed under moderate of low stringency conditions, such conditions are well-known to the skilled artisan (see e.g., Sambrook et al., 1989, Molecular Cloning, A Laboratory Manual, 2d Ed., Cold Spring Harbor Laboratory Press, Cold Spring Harbor, N.Y.; see also, Ausubel et al., eds., in the Current Protocols in Molecular Biology series of laboratory technique manuals, 1987-1997 Current Protocols,© 1994-1997 John Wiley and Sons, Inc., each of which is incorporated by reference herein in their entirety). An illustrative low stringency condition is provided by the following system of buffers: hybridization in a buffer comprising 35% formamide, 5×SSC, 50 mM Tris-HCl (pH 7.5), 5 mM EDTA, 0.02% PVP, 0.02% Ficoll, 0.2% BSA, 100 μg/ml denatured salmon sperm DNA, and 10% (wt/vol) dextran sulfate for 18-20 hours at 40 □C, washing in a buffer consisting of 2×SSC, 25 mM Tris-HCl (pH 7.4), 5 mM EDTA, and 0.1% SDS for 1.5 hours at 55 □C, and washing in a buffer consisting of 2×SSC, 25 mM Tris-HCl (pH 7.4), 5 mM EDTA, and 0.1% SDS for 1.5 hours at 60 □C.

[0416] In certain embodiments, a mammalian MPV can be classified into one of the variant using probes that are specific for a specific variant of mammalian MPV. Such probes include primers for RT-PCR (Table 5) and antibodies.

[0417] In certain embodiments of the invention, the different variants of mammalian MPV can be distinguished from each other by way of the amino acid sequences of the different viral proteins. In other embodiments, the different variants of mammalian MPV can be distinguished from each other by way of the nucleotide sequences of the different ORFs encoded by the viral genome. A variant of mammalian MPV can be, but is not limited to, A1, A2, B1 or B2.

[0418] An isolate of mammalian MPV is classified as a variant B1 if it is phylogenetically closer related to the viral isolate NL/1/99 (SEQ ID NO:18) than it is related to any of the following other viral isolates: NL/1/00 (SEQ ID NO:19), NL/17/00 (SEQ ID NO:20) and NL/1/94 (SEQ ID NO:21). One or more of the ORFs of a mammalian MPV can be used to classify the mammalian MPV into a variant. A mammalian MPV can be classified as an MPV variant B1, if the amino acid sequence of its G protein is at least 66%, at least 70%, at least 75%, at least 80%, at least 85%, at least 90%, at least 95%, at least 98%, or at least 99% or at least 99.5% identical to the G protein of a mammalian MPV variant B1 as represented by the prototype NL/1/99 (SEQ ID NO:324); if the amino acid sequence of its N proteint is at least 98.5% or at least 99% or at least 99.5% identical to the N protein of a mammalian MPV variant B1 as represented by the prototype NL/1/99 (SEQ ID NO:368); if the amino acid sequence of its P protein is at least 96%, at least 98%, or at least 99% or at least 99.5% identical to the P protein of a mammalian MPV variant B1 as represented by the prototype NL/1/99 (SEQ ID NO:376); if the amino acid sequence of its M protein is identical to the M protein of a mammalian MPV variant B1 as represented by the prototype NL/1/99 (SEQ ID NO:360); if the amino acid sequence of its F protein is at least 99% identical to the F protein of a mammalian MPV variant B1 as represented by the prototype NL/1/99 (SEQ ID NO:316); if the amino acid sequence of its M2-1 protein is at least 98% or at least 99% or at least 99.5% identical to the M2-1 protein of a mammalian MPV variant B1 as represented by the prototype NL/1/99 (SEQ ID NO:340); if the amino acid sequence of its M2-2 protein is at least 99% or at least 99.5% identical to the M2-2 protein of a mammalian MPV variant B1 as represented by the prototype NL/1/99 (SEQ ID NO:348); if the amino acid sequence of its SH protein is at least 83%, at least 85%, at least 90%, at least 95%, at least 98%, or at least 99% or at least 99.5% identical to the SH protein of a mammalian MPV variant B1 as represented by the prototype NL/1/99 (SEQ ID NO:384); and/or if the amino acid sequence of its L protein is at least 99% or at least 99.5% identical to the L protein a mammalian MPV variant B1 as represented by the prototype NL/1/99 (SEQ ID NO:332).

[0419] An isolate of mammalian MPV is classified as a variant A1 if it is phylogenetically closer related to the viral isolate NL/1/00 (SEQ ID NO:19) than it is related to any of the following other viral isolates: NL/1/99 (SEQ ID NO:18), NL/17/00 (SEQ ID NO:20) and NL/1/94 (SEQ ID NO:21). One or more of the ORFs of a mammalian MPV can be used to classify the mammalian MPV into a variant. A mammalian MPV can be classified as an MPV variant A1, if the amino acid sequence of its G protein is at least 66%, at least 70%, at least 75%, at least 80%, at least 85%, at least 90%, at least 95%, at least 98%, or at least 99% or at least 99.5% identical to the G protein of a mammalian MPV variant A1 as represented by the prototype NL/1/00 (SEQ ID NO:322); if the amino acid sequence of its N protein is at least 99.5% identical to the N protein of a mammalian MPV variant A1 as represented by the prototype NL/1/00 (SEQ ID NO:366); if the amino acid sequence of its P protein is at least 96%, at least 98%, or at least 99% or at least 99.5% identical to the P protein of a mammalian MPV variant A1 as represented by the prototype NL/1/00 (SEQ ID NO:374); if the amino acid sequence of its M protein is at least 99% or at least 99.5% identical to the M protein of a mammalian MPV variant A1 as represented by the prototype NL/1/00 (SEQ ID NO:358); if the amino acid sequence of its F protein is at least 98% or at least 99% or at least 99.5% identical to the F protein of a mammalian MPV variant A1 as represented by the prototype NL/1/00 (SEQ ID NO:314); if the amino acid sequence of its M2-1 protein is at least 99% or at least 99.5% identical to the M2-1 protein of a mammalian MPV variant A1 as represented by the prototype NL/1/00 (SEQ ID NO:338); if the amino acid sequence of its M2-2 protein is at least 96% or at least 99% or at least 99.5% identical to the M2-2 protein of a mammalian MPV variant A1 as represented by the prototype NL/1/00 (SEQ ID NO:346); if the amino acid sequence of its SH protein is at least 84%, at least 90%, at least 95%, at least 98%, or at least 99% or at least 99.5% identical to the SH protein of a mammalian MPV variant A1 as represented by the prototype NL/1/00 (SEQ ID NO:382); and/or if the amino acid sequence of its L protein is at least 99% or at least 99.5% identical to the L protein of a virus of a mammalian MPV variant A1 as represented by the prototype NL/1/00 (SEQ ID NO:330).

[0420] An isolate of mammalian MPV is classified as a variant A2 if it is phylogenetically closer related to the viral isolate NL/17/00 (SEQ ID NO:20) than it is related to any of the following other viral isolates: NL/1/99 (SEQ ID NO:18), NL/1/00 (SEQ ID NO:19) and NL/1/94 (SEQ ID NO:21). One or more of the ORFs of a mammalian MPV can be used to classify the mammalian MPV into a variant. A mammalian MPV can be classified as an MPV variant A2, if the amino acid sequence of its G protein is at least 66%, at least 70%, at least 75%, at least 80%, at least 85%, at least 90%, at least 95%, at least 98%, at least 99% or at least 99.5% identical to the G protein of a mammalian MPV variant A2 as represented by the prototype NL/17/00 (SEQ ID NO:332); if the amino acid sequence of its N protein is at least 99.5% identical to the N protein of a mammalian MPV variant A2 as represented by the prototype NL/17/00 (SEQ ID NO:367); if the amino acid sequence of its P protein is at least 96%, at least 98%, at least 99% or at least 99.5% identical to the P protein of a mammalian MPV variant A2 as represented by the prototype NL/17/00 (SEQ ID NO:375); if the amino acid sequence of its M protein is at least 99%, or at least 99.5% identical to the M protein of a mammalian MPV variant A2 as represented by the prototype NL/17/00 (SEQ ID NO:359); if the amino acid sequence of its F protein is at least 98%, at least 99% or at least 99.5% identical to the F protein of a mammalian MPV variant A2 as represented by the prototype NL/17/00 (SEQ ID NO:315); if the amino acid sequence of its M2-1 protein is at least 99%, or at least 99.5% identical to the M2-1 protein of a mammalian MPV variant A2 as represented by the prototype NL/17/00 (SEQ ID NO: 339); if the amino acid sequence of its M2-2 protein is at least 96%, at least 98%, at least 99% or at least 99.5% identical to the M22 protein of a mammalian MPV variant A2 as represented by the prototype NL/17/00 (SEQ ID NO:347); if the amino acid sequence of its SH protein is at least 84%, at least 85%, at least 90%, at least 95%, at least 98%, at least 99% or at least 99.5% identical to the SH protein of a mammalian MPV variant A2 as represented by the prototype NL/17/00 (SEQ ID NO:383); if the amino acid sequence of its L protein is at least 99% or at least 99.5% identical to the L protein of a mammalian MPV variant A2 as represented by the prototype NL/17/00 (SEQ ID NO:331).

[0421] An isolate of mammalian MPV is classified as a variant B2 if it is phylogenetically closer related to the viral isolate NL/1/94 (SEQ ID NO:21) than it is related to any of the following other viral isolates: NL/1/99 (SEQ ID NO:18), NL/1/00 (SEQ ID NO:19) and NL/17/00 (SEQ ID NO:20). One or more of the ORFs of a mammalian MPV can be used to classify the mammalian MPV into a variant. A mammalian MPV can be classified as an MPV variant B2, if the amino acid sequence of its G protein is at least 66%, at least 70%, at least 75%, at least 80%, at least 85%, at least 90%, at least 95%, at least 98%, or at least 99% or at least 99.5% identical to the G protein of a mammalian MPV variant B2 as represented by the prototype NL/1/94 (SEQ ID NO:325); if the amino acid sequence of its N protein is at least 99% or at least 99.5% identical to the N protein of a mammalian MPV variant B2 as represented by the prototype NL/1/94 (SEQ ID NO:369); if the amino acid sequence of its P protein is at least 96%, at least 98%, or at least 99% or at least 99.5% identical to the P protein of a mammalian MPV variant B2 as represented by the prototype NL/1/94 (SEQ ID NO:377); if the amino acid sequence of its M protein is identical to the M protein of a mammalian MPV variant B2 as represented by the prototype NL/1/94 (SEQ ID NO:361); if the amino acid sequence of its F protein is at least 99% or at least 99.5% identical to the F protein of a mammalian MPV variant B2 as represented by the prototype NL/1/94 (SEQ ID NO:317); if the amino acid sequence of the M2-1 protein is at least 98% or at least 99% or at least 99.5% identical to the M2-1 protein of a mammalian MPV variant B2 as represented by the prototype NL/1/94 (SEQ ID NO:341); if the amino acid sequence that is at least 99% or at least 99.5% identical to the M2-2 protein of a mammalian MPV variant B2 as represented by the prototype NL/1/94 (SEQ ID NO:349); if the amino acid sequence of its SH protein is at least 84%, at least 85%, at least 90%, at least 95%, at least 98%, or at least 99% or at least 99.5% identical to the SH protein of a mammalian MPV variant B2 as represented by the prototype NL/1/94 (SEQ ID NO:385); and/or if the amino acid sequence of its L protein is at least 99% or at least 99.5% identical to the L protein of a mammalian MPV variant B2 as represented by the prototype NL/1/94 (SEQ ID NO:333).

[0422] In certain embodiments, the percentage of sequence identity is based on an alignment of the full length proteins. In other embodiments, the percentage of sequence identity is based on an alignment of contiguous amino acid sequences of the proteins, wherein the amino acid sequences can be 25 amino acids, 50 amino acids, 75 amino acids, 100 amino acids, 125 amino acids, 150 amino acids, 175 amino acids, 200 amino acids, 225 amino acids, 250 amino acids, 275 amino acids, 300 amino acids, 325 amino acids, 350 amino acids, 375 amino acids, 400 amino acids, 425 amino acids, 450 amino acids, 475 amino acids, 500 amino acids, 750 amino acids, 1000 amino acids, 1250 amino acids, 1500 amino acids, 1750 amino acids, 2000 amino acids or 2250 amino acids in length.

[0423] Functional Characteristics of a Mammalian MPV

[0424] In addition to the structural definitions of the mammalian MPV, a mammalian MPV can also be defined by its functional characteristics. In certain embodiments, a mammalian MPV is capable of infecting a mammalian host. The mammalian host can be a mammalian cell, tissue, organ or a mammal. In a specific embodiment, the mammalian host is a human or a human cell, tissue or organ. Any method known to the skilled artisan can be used to test whether the mammalian host has been infected with the mammalian MPV. In certain embodiments, the virus is tested for its ability to attach to a mammalian cell. In certain other embodiments, the virus is tested for its ability to transfer its genome into the mammalian cell.

[0425] In an illustrative embodiment, the genome of the virus is detectably labeled, e.g., radioactively labeled. The virus is then incubated with a mammalian cell for at least 1 minute, at least 5 minutes at least 15 minutes, at least 30 minutes, at least 1 hour, at least 2 hours, at least 5 hours, at least 12 hours, or at least 1 day. The cells are subsequently washed to remove any viral particles from the cells and the cells are then tested for the presence of the viral genome by virtue of the detectable label. In another embodiment, the presence of the viral genome in the cells is detected using RT-PCR using mammalian MPV specific primers. (See, PCT WO 02/057302 at pp.37 to 44, which is incorporated by reference herein).

[0426] In certain embodiments, a mammalian virus is capable to infect a mammalian host and to cause proteins of the mammalian MPV to be inserted into the cytoplasmic membrane of the mammalian host. The mammalian host can be a cultured mammalian cell, organ, tissue or mammal. In an illustrative embodiment, a mammalian cell is incubated with the mammalian virus. The cells are subsequently washed under conditions that remove the virus from the surface of the cell. Any technique known to the skilled artisan can be used to detect the newly expressed viral protein inserted in the cytoplasmic membrane of the mammalian cell. For example, after infection of the cell with the virus, the cells are maintained in medium comprising a detectably labeled amino acid. The cells are subsequently harvested, lysed, and the cytoplasmic fraction is separated from the membrane fraction. The proteins of the membrane fraction are then solubilized and then subjected to an immunoprecipitation using antibodies specific to a protein of the mammalian MPV, such as, but not limited to, the F protein or the G protein. The immunoprecipitated proteins are then subjected to SDS PAGE. The presence of viral protein can then be detected by autoradiography. In another embodiment, the presence of viral proteins in the cytoplasmic membrane of the host cell can be detected by immunocytochemistry using one or more antibodies specific to proteins of the mammalian MPV.

[0427] In even other embodiments, a mammalian MPV is capable of infecting a mammalian host and of replicating in the mammalian host. The mammalian host can be a cultured mammalian cell, organ, tissue or mammal. Any technique known to the skilled artisan can be used to determine whether a virus is capable of infecting a mammalian cell and of replicating within the mammalian host. In a specific embodiment, mammalian cells are infected with the virus. The cells are subsequently maintained for at least 30 minutes, at least 1 hour, at least 2 hours, at least 5 hours, at least 12 hours, at least 1 day, or at least 2 days. The level of viral genomic RNA in the cells can be monitored using Northern blot analysis, RT-PCR or in situ hybridization using probes that are specific to the viral genome. An increase in viral genomic RNA demonstrates that the virus can infect a mammalian cell and can replicate within a mammalian cell.

[0428] In even other embodiments, a mammalian MPV is capable of infecting a mammalian host, wherein the infection causes the mammalian host to produce new infectious mammalian MPV. The mammalian host can be a cultured mammalian cell or a mammal. Any technique known to the skilled artisan can be used to determine whether a virus is capable of infecting a mammalian host and cause the mammalian host to produce new infectious viral particles. In an illustrative example, mammalian cells are infected with a mammalian virus. The cells are subsequently washed and incubated for at least 30 minutes, at least 1 hour, at least 2 hours, at is least 5 hours, at least 12 hours, at least 1 day, at least 2 days, at least one week, or at least twelve days. The titer of virus can be monitored by any method known to the skilled artisan. For exemplary methods see section 5.8.

[0429] In certain, specific embodiments, a mammalian MPV is a human MPV. The tests described in this section can also be performed with a human MPV. In certain embodiments, the human MPV is capable of infecting a mammalian host, such as a mammal or a mammalian cultured cell.

[0430] In certain embodiments, a human MPV is capable to infect a mammalian host and to cause proteins of the human MPV to be inserted into the cytoplasmic membrane of the mammalian host.

[0431] In even other embodiments, a human MPV is capable of infecting a mammalian host and of replicating in the mammalian host.

[0432] In even other embodiments, the human MPV of the invention is capable of infecting a mammalian host and of replicating in the mammalian host, wherein the infection and replication causes the mammalian host to produce and package new infectious human MPV.

[0433] In certain embodiments, a mammalian MPV, even though it is capable of infecting a mammalian host, is also capable of infecting an avian host, such as a bird or an avian cultured cell. In certain embodiments, the mammalian MPV is capable to infect an avian host and to cause proteins of the mammalian MPV to be inserted into the cytoplasmic membrane of the avian host. In even other embodiments, the mammalian MPV of the invention is capable of infecting an avian host and of replicating in the avian host. In even other embodiments, the mammalian MPV of the invention is capable of infecting an avian host and of replicating in the avian host, wherein the infection and replication causes the avian host to produce and package new infectious mammalian MPV.

[0434] A description of mammalian MPV can also be found in co-owned and co-pending U.S. application Nos.: Ser. No. 10/371,099 and Ser. No. 10/371,122; both filed on Feb. 21, 2003; both of which are incorporated herein by reference in their entireties.

[0435] 4.1.7.2 Anti-hMPV Antibodies

[0436] An anti-hMPV-antigen antibody to be used with the methods of the invention can be an antibody that immunospecifically binds to hMPV nucleoprotein, hMPV phosphoprotein, hMPV matrix protein, hMPV small hydrophobic protein, hMPV RNA-dependent RNA polymerase, hMPV F protein, and hMPV G protein.

[0437] In certain embodiments, the anti-hMPV-antigen antibody binds immunospecifically to a hMPV antigen of a hMPV isolate from Canadian, to a hMPV isolate from The Netherlands, and/or to a hMPV antigen from a hMPV isolate from Australia. The different isolates are described in Peret et al, 2002, J Infect Dis 185:1660-1663, which is incorporated herein by reference in its entirety.

[0438] In certain embodiments, an anti-hMPV-antigen antibody binds to allelic variants of a hMPV nucleoprotein, hMPV phosphoprotein, hMPV matrix protein, hMPV small hydrophobic protein, hMPV RNA-dependent RNA polymerase, hMPV F protein, and/or hMPV G protein.

[0439] In certain embodiments, an antibody to be used with the methods of treatment of the invention is an antibody that immunospecifically binds to a mammalian MPV, or a protein of a mammalian MPV as described in section 4.1.7.1. In certain embodiments, an antibody to be used with the methods of treatment of the invention is an antibody that immunospecifically binds to a human MPV.

[0440] In certain embodiments, the anti-hMPV-antigen antibody binds immunospecifically to a protein/polypeptide that consists, e.g., of an amino acid sequence of SEQ ID NOs: 399-406, 420, or 421, respectively.

[0441] In certain embodiments, the anti-hMPV-antigen antibody binds immunospecifically to a protein/polypeptide that consists of an amino acid sequence that is at least 60%, 70%, 80%, 90%, 95%, or at least 98% identical to the amino acid sequence of SEQ ID NOs: 399-406, 420, or 421, respectively. In certain embodiments, the anti-hMPV-antigen antibody binds immunospecifically to a protein/polypeptide that consists of an amino acid sequence that is at most 70%, 80%, 90%, 95%, 98% or at most 100% identical to the amino acid sequence of SEQ ID NOs: 399-406, 420, or 421, respectively.

[0442] In certain embodiments, the anti-hMPV-antigen antibody cross reacts with an APV antigen from APV associated with any avian, particularly turkey, duck, or chicken. In certain, more specific embodiments, the anti-hMPV-antibody cross-reacts with an antigen of APV-A, APV-B, APV-C, and/or APV-D, or any combination thereof, particularly turkey APV. In certain more specific embodiments, the anti-hMPV-antigen antibody cross-reacts with an antigen from a European APV isolate. In certain other embodiments, the anti-hMPV-antigen antibody cross-reacts with an antigen from a North American APV isolate. In certain embodiments, the anti-hMPV-antigen antibody cross-reacts with a APV nucleoprotein, APV phosphoprotein, APV matrix protein, APV small hydrophobic protein, APV RNA-dependent RNA polymerase, APV F protein, and/or APV G protein. In certain embodiments, the anti-hMPV-antigen antibody does not cross-react with an APV antigen. In certain embodiments, the anti-hMPV-antigen antibody cross reacts with an APV antigen of an amino acid sequence of, e.g., SEQ ID NO:424 to 429, respectively.

[0443] In a specific embodiment, a monoclonal antibody against the F protein of hMPV is generated. In a more specific embodiment, the F protein of hMPV is produced using a baculovirus expression system (e.g., the BD BaculoGold™ Baculovirus Expression Vector System can be used from BD Biosciences, NJ). In certain embodiments, the F protein is expressed without the transmembrane domain to induce secretion of the F protein from the cell in which the protein is expressed. Exemplary expression constructs that can be used for the expression of F protein for the generation of antibodies against the F protein are shown in FIG. 1.

[0444] In certain embodiments, peptides that contain the following amino acid sequences are used for the generation of antibodies for use with the methods of the invention: amino acid 19 to 28; amino acid 94 to 106; amino acid 476 to 409, and/or amino acid 223 to 236 of SEQ ID NO:234 or SEQ ID NO:279. In certain embodiments, peptides that contain the amino acid sequences of SEQ ID NOs:430-437 are used as immunogens for the generation of antibodies for use with the methods of the invention. Without being bound by theory the sequences of SEQ ID NOs:430-437 contain the heptad repeats of the F proteins of different strains of human metapneumoviruses.

[0445] In certain embodiments, an antibody to be used with the methods of the invention binds to a heptad repeat. In certain, more specific embodiments, an antibody to be used with the methods of the invention binds to a heptad repeat of the F protein of a mammalian metapneumovirus (e.g., hMPV). In certain, even more specific embodiments, an antibody to be used with the methods of the invention binds to heptad repeat 1 or heptad repeat 2 of the F protein of a mammalian metapneumovirus (e.g., hMPV). In certain embodiments, an antibody to be used with the methods of the invention binds to a heptad repeat of the F protein of APV.

[0446] Alignment of the human metapneumoviral F protein with the F protein of an avian pneumovirus isolated from Mallard Duck shows 85.6% identity in the ectodomain.

[0447] Alignment of the human metapneumoviral F protein with the F protein of an avian pneumovirus isolated from Turkey (subgroup B) shows 75% identity in the ectodomain. See, e.g., co-owned and co-pending Provisional Application No. 60/358,934, entitled “Recombinant Parainfluenza Virus Expression Systems and Vaccines Comprising Heterologous Antigens Derived from Metapneumovirus”, filed on Feb. 21, 2002, by Haller and Tang, which is incorporated herein by reference in its entirety. Therefore, an antigen from avian metapneumovirus, and in particular the F protein from turkey metapneumovirus is a useful antigen for generating antibodies against human metapneumovirus.

[0448] In certain embodiments, the anti-hMPV-antigen antibody is a bispecific antibody. In certain embodiments, the bispecific antibody binds to two different epitopes of the same hMPV antigen. In certain other embodiments, the bispecific antibody binds to epitopes on two different hMPV antigens. In certain embodiments, the bispecific antibody binds immunospecifically to (i) a hMPV antigen and (ii) to an APV, a PIV, and/or a RSV antigen.

[0449] In certain embodiments, an antibody to be used with the methods of the invention is a bispecific antibody that binds to the F protein of RSV and to the F protein of hMPV. The bispecific antibody can be generated by chemical procedure or a recombinant approach. The antibody can be diabody, F(ab′)₂, F(ab′)₂ fused with lucine zippers, single chain diabodies, etc. The antibody can also be a multivalent antibody, such as quadruplebody. In certain embodiments, a bispecific antibody is constructed using Numax or Synagis for the part of the antibody that binds the RSV F protein in combination with an antibody that binds the hMPV F protein.

[0450] 4.1.7.3 Multiple Protein Monoclonal Antibodies

[0451] To generate multiple protein monoclonal antibodies, Balb/c or SJL mice (mice can be obtained, e.g., from The Jackson Laboratory, Maine) are immunized first with live hMPV and later with adjuvanted hMPV, bovine PIV or purified F protein of hMPV. In a more specific embodiment, mice are immunized intranasally one to two times with hMPV followed by intraperitoneal injections with either hMPV (to produce all types of neutralizing antibodies, e.g., F or G protein) or with intranasal immunization with bPIV/hMPV F or intraperitoneal immunization of purified F protein. bPIV/hMPV F is a chimeric virus wherein the coding sequence for the hMPV F protein is inserted into bovine PIV. A more detailed description of PIV vectors and their use as expression systems can be found in co-owned and co-pending U.S. application Nos.: Ser. No. 10/371,264 and Ser. No. 10/373,567, both filed on Feb. 21, 2003, both of which are incorporated herein by reference in their entireties. In certain specific embodiments, for each immunization 100 microliter of virus at 10⁶-10⁷ pfu/ml per mouse are used.

[0452] 4.1.8 Anti-PIV-Antigen Antibodies

[0453] In certain embodiments, an anti-PIV-antigen antibody binds immunospecifically to a PIV nucleocapsid structural protein, a PIV fusion glycoprotein, a PIV phosphoprotein, a PIV L protein, a PIV matrix protein, a PIV HN glycoprotein, a PIV RNA-dependent RNA polymerase, a PIV Y1 protein, a PIV D protein, a F glycoprotein, a PIV hemagglutinin-neuraminidase, or a PIV C protein.

[0454] In certain embodiments, the anti-PIV-antigen antibody binds to an antigen of PIV type 1, PIV type 2, and/or PIV type 3, or any combination thereof.

[0455] In certain embodiments, an anti-PIV-antigen antibody binds to allelic variants of a PIV nucleocapsid structural protein, a PIV fusion glycoprotein, a PIV phosphoprotein, a PIV L protein, a PIV matrix protein, a PIV HN glycoprotein, a PIV RNA-dependent RNA polymerase, a PIV Y1 protein, a PIV D protein, a F glycoprotein, a PIV hemagglutinin-neuraminidase, or a PIV C protein.

[0456] In certain embodiments, the anti-PIV-antigen antibody binds immunospecifically to a PIV RNA polymerase alpha subunit (Nucleocapsid phosphoprotein), e.g., having an amino acid sequence of SEQ ID NO:407; a PIV L polymerase protein, e.g., having an amino acid sequence of SEQ ID NO:408; a PIV HN glycoprotein, e.g. having an amino acid sequence of SEQ ID NO:409; a PIV matrix protein, e.g., having an amino acid sequence of SEQ ID NO:410; a PIV Y1 protein, e.g., having an amino acid sequence of SEQ ID NO:411; a PIV C protein, e.g., having an amino acid sequence of SEQ ID NO:412; a PIV phosphoprotein, e.g., having an amino acid sequence of SEQ ID NO:413; a PIV nucleoprotein, e.g., having an amino acid sequence of SEQ ID NO:414; a PIV F glycoprotein, e.g., having an amino acid sequence of SEQ ID NO:415; a PIV D protein, e.g., having an amino acid sequence of SEQ ID NO:416; a PIV hemagglutinin-neuraminidase, e.g., having an amino acid sequence of SEQ ID NO:417; a PIV nucleocapsid protein, e.g., having an amino acid sequence of SEQ ID NO:418; a PIV P protein, e.g., having an amino acid sequence of SEQ ID NO:419.

[0457] In certain embodiments, the anti-PIV-antigen antibody binds immunospecifically to a protein/polypeptide that consists of an amino acid sequence that is at least 60%, 70%, 80%, 90%, 95%, or at least 98% identical to the amino acid sequence of an RNA polymerase alpha subunit (Nucleocapsid phosphoprotein) SEQ ID NO:407; L polymerase protein SEQ ID NO:408; HN glycoprotein SEQ ID NO:409; matrix protein SEQ ID NO:410; Y1 protein SEQ ID NO:411; C protein SEQ ID NO:412; phosphoprotein SEQ ID NO:413; nucleoprotein SEQ ID NO:414; F glycoprotein SEQ ID NO:415; D protein SEQ ID NO:416; hemagglutinin-neuraminidase SEQ ID NO:417; nucleocapsid protein SEQ ID NO:418; P protein SEQ ID NO:419. In certain embodiments, the anti-PIV-antigen antibody binds immunospecifically to a protein/polypeptide that consists of an amino acid sequence that is at most 70%, 80%, 90%, 95%, 98% or at most 100% identical to the amino acid sequence of an RNA polymerase alpha subunit (Nucleocapsid phosphoprotein) SEQ ID NO:407; L polymerase protein SEQ ID NO:408; HN glycoprotein SEQ ID NO:409; matrix protein SEQ ID NO:410; Y1 protein SEQ ID NO:411; C protein SEQ ID NO:412; phosphoprotein SEQ ID NO:413; nucleoprotein SEQ ID NO:414; F glycoprotein SEQ ID NO:415; D protein SEQ ID NO:416; hemagglutinin-neuraminidase SEQ ID NO:417; nucleocapsid protein SEQ ID NO:418; P protein SEQ ID NO:419.

[0458] 4.2 Prophylaxis and Therapy of Respiratory Viral Infections

[0459] The invention provides methods for broad-spectrum treatment and prevention of respiratory viral infections. To obtain broad-spectrum protection against respiratory viral infection in a subject, a plurality of antibodies, each of which can bind immunospecifically to an epitope on a different virus that causes respiratory infections, is administered to the subject. In certain embodiments, a plurality of antibodies that bind immunospecifically to antigens of different viruses that cause respiratory infections is administered. In certain embodiments, a plurality of antibodies that bind immunospecifically to different antigens of hMPV, PIV, and/or RSV, is administered. In certain embodiments, antibodies that cross-react with antigens from different respiratory viruses are administered. In specific embodiments, an antibody that immunospecifically binds to an antigen of hMPV cross reacts with an antigen of APV, particularly turkey APV. More specifically, an antibody that binds immunospecifically to the F protein of hMPV cross-reacts with the F protein of APV.

[0460] In certain embodiments, at least one of the antibodies to be administered to a subject is an antibody-conjugate.

[0461] Administering different antibodies with different immunospecificities ensures that the prophylaxis/therapy is effective against respiratory viruses even if some antigens of the viruses have modified amino acid sequences. In general there are two approaches to ensure that at least one of the administered plurality of antibodies binds immunospecifically to one or more of the infectious respiratory viral particles. First, antibodies against different epitopes of one or more viruses may be included in the plurality of antibodies. Thus, even if one of the epitopes of the infectious respiratory viral particle is different from the corresponding epitope against which one of the antibodies was raised, another antibody of the plurality of antibodies binds immunospecifically to an epitope of the infectious respiratory viral particle. In certain embodiments, even if one of the antigens of the infectious respiratory viral particle is different from the corresponding antigen against which one of the antibodies of the plurality of antibodies was raised, another antibody of the plurality of antibodies binds immunospecifically to an antigen of the infectious respiratory viral particle. Secondly, antibodies that cross-react with different antigens from different viruses, such as the F protein from RSV and the F protein from hMPV can be included in the plurality of antibodies to broaden the spectrum of viruses, subtypes of viruses, subgroups of viruses, mutated viruses, groups of viruses, and types of viruses against which the plurality of antibodies is effective.

[0462] In certain embodiment of the invention, the antibodies that are administered to the subject have a synergistic effect in treating and/or preventing an respiratory viral infection. In certain embodiments, the combination of a variety of antibodies is effective in treating or preventing a respiratory viral infection while the individual administration of only one antibody is not effective in treating or preventing a respiratory viral infection.

[0463] In certain embodiments, the methods of the invention include administering (i) one or more anti-RSV-antigen antibodies or antigen-binding fragments thereof; (ii) one or more anti-hMPV-antigen antibodies or antigen-binding fragments thereof; and/or (iii) one or more anti-PIV-antigen antibodies or antigen-binding fragmens thereof; and (iv) and one or more vaccines directed against viruses that cause respiratory infections. In a specific embodiment, the vaccine is directed against hMPV. Such vaccines are described in U.S. Provisional Application No. 60/358,934, entitled “Recombinant Parainfluenza Virus Expression Systems and Vaccines Comprising Heterologous Antigens Derived from Metapneumovirus”, filed Feb. 21, 2002, which is incorporated by reference in its entirety herein.

[0464] In certain other embodiments, the methods further include administering an anti-viral agent. Anti-viral agents include, but are not limited to, nucleoside analogs, such as zidovudine, acyclovir, gangcyclovir, vidarabine, idoxuridine, trifluridine, and ribavirin, as well as foscamet, amantadine, rimantadine, saquinavir, indinavir, ritonavir, and the alpha-interferons.

[0465] 4.2.1 Combination Prophylaxis and Therapy with Anti-RSV-Antigen Antibodies, Anti-hMPV-Antigen Antibodies, and Anti-PIV-Antigen Antibodies

[0466] In certain embodiments, the invention provides methods for preventing, treating and/or ameliorating one or more symptoms of a respiratory viral infection in a subject, the method comprising administering to the subject one or more anti-RSV-antigen antibodies or antigen-binding fragments thereof, one or more anti-PIV-antigen antibodies or antigen-binding fragments thereof, and one or more anti-hMPV-antigen antibodies or antigen-binding fragments thereof. In specific embodiments, the invention provides administering to a subject a prophylactically effective amount of one or more anti-RSV-antigen antibodies or antigen-binding fragments thereof, a prophylactically effective amount of one or more anti-PIV-antigen antibodies or antigen-binding fragments thereof, and a prophylactically effective amount of one or more anti-hMPV-antigen antibodies or antigen-binding fragments thereof to prevent a respiratory viral infection in a subject. In specific embodiments, the invention provides administering to a subject a therapeutically effective amount of one or more anti-RSV-antigen antibodies or antigen-binding fragments thereof, a therapeutically effective amount of one or more anti-PIV-antigen antibodies or antigen-binding fragments thereof, and a therapeutically effective amount of one or more anti-hMPV-antigen antibodies or antigen-binding fragments thereof to treat a respiratory viral infection in a subject. In specific emodiments of the invention, the respiratory viral infection is an infection with RSV, PIV, and/or hMPV. In certain embodiments, the subject is exposed to a risk of infection with RSV, PIV, and/or hMPV.

[0467] In certain embodiments, the invention provides methods of passive immunotherapy, wherein the methods comprises administering a first dose of one or more anti-RSV-antigen antibodies or antigen-binding fragments thereof, a second dose of one or more anti-PIV-antigen antibodies or antigen-binding fragments thereof, and a third dose of one or more anti-hMPV-antigen antibodies or antigen-binding fragments thereof and wherein the first dose reduces the incidence of a RSV infection by at least 25%, wherein the second dose reduces the incidence of a PIV infection by at least 25%, and wherein the third dose reduces the incidence of a hMPV infection by at least 25%. In certain embodiments, the first dose reduces the incidence of a RSV infection by at least 10%, 15%, 20%, 30%, 40%, 50%, 60%, 70%, 75%, 80%, 90%, 95%, or by at least 98%, wherein the second dose reduces the incidence of a PIV infection by at least 10%, 15%, 20%, 30%, 40%, 50%, 60%, 70%, 75%, 80%, 90%, 95%, or by at least 98%, and wherein the third dose reduces the incidence of a hMPV infection by at least 10%, 15%, 20%, 30%, 40%, 50%, 60%, 70%, 75%, 80%, 90%, 95%, or by at least 98%.

[0468] In certain embodiments, the invention provides a method of passive immunotherapy wherein the method comprises administering to a subject: (i) a first dose of one or more first antibodies or antigen-binding fragments thereof, wherein said one or more first antibodies or antigen-binding fragments thereof bind immunospecifically to a RSV antigen; (ii) a second dose of one or more second antibodies or antigen-binding fragments thereof, wherein said one or more second antibodies or antigen-binding fragments thereof bind immunospecifically to a hMPV antigen, and (iii) a third dose of one or more third antibodies wherein the one or more third antibodies or antigen-binding fragments thereof bind immunospecifically to a PIV antigen, wherein the serum titer of said one or more first antibodies or antigen-binding fragments thereof in the subject is at least 10 μg/ml after 15 days of administering said one or more first antibodies or antigen-binding fragments thereof, wherein the serum titer of said one or more second antibodies or antigen-binding fragments thereof in the subject is at least 10 μg/ml after 15 days of administering said one or more second antibodies or antigen-binding fragments thereof, and wherein the serum titer of said one or more third antibodies or antigen-binding fragments thereof in the subject is at least 10 μg/ml after 15 days of administering said one or more second antibodies or antigen-binding fragments thereof. In certain embodiments, the serum titer of said one or more first antibodies or antigen-binding fragments thereof in the subject is at least 0.1 μg/ml, 0.5 μg/ml, 1 μg/ml, 5 μg/ml, 10 μg/ml, 20 μg/ml, 30 μg/ml, 40 μg/ml, 50 μg/ml, 75 μg/ml, 100 μg/ml, 150 μg/ml, 250 μg/ml, or at least 500 μg/ml after 15 days of administering said one or more first antibodies or antigen-binding fragments thereof, wherein the serum titer of said one or more second antibodies or antigen-binding fragments thereof in the subject is at least 0.1 μg/ml, 0.5 μg/ml, 1 μg/ml, 5 μg/ml, 10 μg/ml, 20 μg/ml, 30 μg/ml, 40 μg/ml, 50 μg/ml, 75 μg/ml, 100 μg/ml, 150 μg/ml, 250 μg/ml, or at least 500 μg/ml after 15 days of administering said one or more second antibodies or antigen-binding fragments thereof, and wherein the serum titer of said one or more third antibodies or antigen-binding fragments thereof in the subject is at least 0.1 μg/ml, 0.5 μg/ml, 1 μg/ml, 5 μg/ml, 10 μg/ml, 20 μg/ml, 30 μg/ml, 40 μg/ml, 50 μg/ml, 75 μg/ml, 100 μg/ml, 150 μg/ml, 250 μg/ml, or at least 500 μg/ml after 15 days of administering said one or more second antibodies or antigen-binding fragments thereof.

[0469] In certain embodiments, the one or more anti-RSV-antigen antibodies, the one or more anti-PIV-antigen antibodies, and the one or more anti-hMPV-antigen antibodies, or any combination of these antibodies, are administered concurrently. In certain, more specific embodiments, the antibodies are administered concurrently via the same route, e.g., but not limited to, intravenous or intramuscular. In certain other embodiments, the antibodies are administered concurrently via different routes.

[0470] In other embodiments, the one or more anti-RSV-antigen antibodies, the one or more anti-PIV-antigen antibodies, and the one or more anti-hMPV-antigen antibodies are administered subsequent to each other separated by a time period. In certain embodiments, the time period is 1 day, 2 days, 3 days, 4 days, 5 days, 6 days, 1 week, 2 weeks, 3 weeks, 1 month, 2 months, or 3 months. In a specific embodiment of the invention, the one or more anti-RSV-antigen antibodies are administered first, the one or more anti-PIV-antigen antibodies are administered second, and the one or more anti-hMPV-antigen antibodies are administered third. In a specific embodiment of the invention, the one or more anti-hMPV-antigen antibodies are administered first, the one or more anti-RSV-antigen antibodies are administered second, and the one or more anti-PIV-antigen antibodies are administered third.

[0471] In a specific embodiment of the invention, the one or more anti-PIV-antigen antibodies are administered first, the one or more anti-hMPV-antigen antibodies are administered second, and the one or more anti-RSV-antigen antibodies are administered third. In certain embodiments, at least one of the antibodies is administered in a sequence of several administrations separated by a time period. Any other order of administration is also encompassed by the methods of the present invention.

[0472] The one or more anti-PIV-antigen antibodies, the one or more anti-hMPV-antigen antibodies, and the one or more anti-RSV-antigen antibodies can also be cyclically administered. Cycling therapy involves the administration of a first prophylactic or therapeutic agent for a period of time, followed by the administration of a second prophylactic or therapeutic agent for a period of time, followed by the administration of a third prophylactic or therapeutic agent for a period of time and so forth, and repeating this sequential administration, i.e., the cycle, in order to reduce the development of resistance to one of the agents, to avoid or reduce the side effects of one of the agents, and/or to improve the efficacy of the treatment.

[0473] In certain embodiments, administration of the same antibody may be repeated and the administrations may be separated by at least 10 days, 15 days, 30 days, 2 months, 3 months, or at least 6 months. In certain embodiments, administration of the same antibody may be repeated and the administrations may be separated by at most 10 days, 15 days, 30 days, 2 months, 3 months, or at least 6 months.

[0474] 4.2.2 Combination Prophylaxis and Therapy with Anti-RSV-Antigen Antibodies and Anti-hMPV-Antigen Antibodies

[0475] The present invention provides methods of preventing and/or treating and ameliorating one or more symptoms associated with a respiratory viral infection in a subject comprising administering to said subject (i) one or more first antibodies or antigen-binding fragments thereof which immunospecifically bind to one or more RSV antigens; and (ii) one or more second antibodies or antigen-binding fragments thereof which immunospecifically bind to one or more hMPV antigens. In a specific embodiment, the subject is a human. In a specific embodiment, the subject has a viral respiratory infection, in particular, is infected with RSV and/or hMPV. In a specific embodiment, the method prevents a subject from infection with RSV and/or hMPV. In a specific embodiment, the subject is susceptible to RSV and/or hMPV infection. In a specific embodiment, the subject is exposed to the risk of infection with RSV and/or hMPV infection.

[0476] In certain embodiments, the one or more first antibodies neutralize RSV. In certain embodiments, the one or more first antibodies neutralize at least 25%, at least 30%, at least 35%, at least 40%, at least 45%, at least 50%, at least 55%, at least 60%, at least 65%, at least 70%, at least 75%, at least 80%, at least 85%, at least 90%, at least 95%, at least 98% or at least 99% of the RSV in an in vitro microneutralization assay (see below). In certain embodiments, the one or more first antibodies neutralize at least 25%, at most 30%, at most 35%, at most 40%, at most 45%, at most 50%, at most 55%, at most 60%, at most 65%, at most 70%, at most 75%, at most 80%, at most 85%, at most 90%, at most 95%, at most 98% or at most 99% of the RSV in an in vitro microneutralization assay (as described in section 4.8.4).

[0477] In certain embodiments, the one or more second antibodies neutralize hMPV. In certain embodiments, the one or more second antibodies neutralize at least 25%, at least 30%, at least 35%, at least 40%, at least 45%, at least 50%, at least 55%, at least 60%, at least 65%, at least 70%, at least 75%, at least 80%, at least 85%, at least 90%, at least 95%, at least 98% or at least 99% of the hMPV in an in vitro microneutralization assay (see below). In certain embodiments, the one or more first antibodies neutralize at least 25%, at most 30%, at most 35%, at most 40%, at most 45%, at most 50%, at most 55%, at most 60%, at most 65%, at most 70%, at most 75%, at most 80%, at most 85%, at most 90%, at most 95%, at most 98% or at most 99% of the hMPV in an in vitro microneutralization assay.

[0478] In certain embodiments, at least one of the one or more antibodies that bind immunospecifically to a RSV antigen is a high affinity and/or high avidity antibody and/or has a longer serum half-life. In certain embodiments, at least one of the one or more antibodies that bind immunospecifically to a hMPV antigen is a high affinity and/or high avidity antibody and/or has a longer serum half-life.

[0479] The high affinity and/or high avidity of the antibodies of the invention enable the use of lower doses of the antibodies compared to non-high affinity or non-high avidity for the amelioration of symptoms associated with RSV infection and/or hMPV infection. The use of lower doses of antibodies which immunospecifically bind to one or more RSV antigens and the use of lower doses of antibodies which immunospecifically bind to one or more hMPV antigens reduces the likelihood of adverse effects, as well as providing a more effective prophylaxis. Further, high affinity and/or high avidity of the antibodies enable less frequent administration of said antibodies than previously thought to be necessary for the prevention, neutralization, treatment and the amelioration of symptoms associated with RSV infection and hMPV infection, respecively.

[0480] In certain embodiments, the one or more antibodies that bind immunospecifically to a RSV antigen and/or the one or more antibodies that bind immunospecifically to a hMPV antigen can be administered directly to the site of RSV infection. In particular, at least one of the antibodies can be administered by pulmonary delivery. Such a mode of administration can reduce the dosage and frequency of administration of the antibodies to a subject.

[0481] In certain embodiments, the serum titer of at least one of the administered antibodies is 1 μg/ml or less, 2 μg/ml or less, 5 μg/ml or less, 6 μg/ml or less, 10 μg/ml or less, 15 μg/ml or less, 20 μg/ml or less, or 25 μg/ml or less. In certain embodiments, the serum titer of at least one of the administered antibodies is at least 1 μg/ml, at least 2 μg/ml, at least 5 μg/ml, at least 6 μg/ml, at least 10 μg/ml, at least 15 μg/ml, at least 20 μg/ml, at least 25 μg/ml, at least 50 μg/ml, at least 100 μg/ml, at least 125 μg/ml, at least 150 μg/ml, at least 175 μg/ml, at least 200 μg/ml, at least 225 μg/ml, at least 250 μg/ml, at least 275 μg/ml, at least 300 μg/ml, at least 325 μg/ml, at least 350 μg/ml, at least 375 μg/ml, or at least 400 μg/ml.

[0482] Preferably a serum titer or serum titer of 1 μg/ml or less, 2 μg/ml or less, 5 μg/ml or less, 6 μg/ml or less, 10 μg/ml or less, 15 μg/ml or less, 20 μg/ml or less, or 25 μg/ml or less is achieved approximately 20 days (preferably 25, 30, 35 or 40 days) after administration of a first dose of antibodies or antigen-binding fragments thereof which immunospecifically bind to a RSV antigen and/or to a hMPV antigen and without administration of any other doses of said antibodies or antigen-binding fragments thereof. Preferably a serum titer or serum titer of at least 1 μg/ml, at least 2 μg/ml, at least 5 μg/ml, at least 6 μg/ml, at least 10 μg/ml, at least 15 μg/ml, at least 20 μg/ml, at least 25 μg/ml, at least 50 μg/ml, at least 100 μg/ml, at least 125 μg/ml, at least 150 μg/ml, at least 175 μg/ml, at least 200 μg/ml, at least 225 μg/ml, at least 250 μg/ml, at least 275 μg/ml, at least 300 μg/ml, at least 325 μg/ml, at least 350 μg/ml, at least 375 μg/ml, or at least 400 μg/ml is achieved approximately 20 days (preferably 25, 30, 35 or 40 days) after administration of a first dose of antibodies or antigen-binding fragments thereof which immunospecifically bind to a RSV antigen and/or to a hMPV antigen and without administration of any other doses of said antibodies or antigen-binding fragments thereof.

[0483] In specific embodiments, a serum titer in a non-primate mammal of at least 0.4 μg/ml, 1 μg/ml, 4 μg/ml, 10 μg/ml, 40 μg/ml, at least 80 μg/ml, at least 100 μg/ml, at least 120 μg/ml, at least 150 μg/ml, at least 200 μg/ml, at least 250 μg/ml, or at least 300 μg/ml, of one or more antibodies or antigen-binding fragments thereof that immunospecifically bind to a RSV antigen and/or of one or more antibodies or antigen-binding fragments thereof that bind immunospecifically to a hMPV antigen is achieved at least 1 day after administering a dose of less than 20 mg/kg, 15 mg/kg, 10 mg/kg, less than 2.5 mg/kg, less than 1 mg/kg, or less than 0.5 mg/kg of the antibodies or antibody fragments to the non-primate mammal. In another embodiment, a serum titer in a non-primate mammal of at least 150 μg/ml, at least 200 μg/ml, at least 250 μg/ml, at least 300 μg/ml, at least 350 μg/ml, or at least 400 μg/ml of one or more antibodies or antigen-binding fragments thereof that immunospecifically bind to one or more RSV antigens and/or that bind immunospecifically to a hMPV antigen is achieved at least 1 day after administering a dose of approximately 5 mg/kg, 10 mg/kg, 15 mg/kg, 20 mg/kg, 25 mg/kg, or 30 mg/kg of the antibodies or antibody fragments to the non-primate mammal.

[0484] In another embodiment, a serum titer in a primate of at least 0.4 μg/ml, 11 g/ml, 10 μg/ml, 40 μg/ml, preferably at least 80 μg/ml, at least 100 μg/ml, at least 120 μg/ml, at least 150 μg/ml, at least 200 μg/ml, at least 250 μg/ml, or at least 300 μg/ml of one or more antibodies or antigen-binding fragments thereof that immunospecifically bind to one or more RSV antigens and/or to one or more hMPV antigens is achieved at least 30 days after administering a first dose of less than 5 mg/kg, 10 mg/kg, 15 mg/kg, 20 mg/kg, 25 mg/kg, or 30 mg/kg, preferably less than 3 mg/kg, less than 1 mg/kg, or less than 0.5 mg/kg of the antibodies or antigen-binding fragments thereof to the primate. In yet another embodiment, a serum titer in a primate of at least 200 μg/ml, at least 250 μg/ml, at least 300 μg/ml, at least 350 μg/ml, or at least 400 μg/ml of one or more antibodies or antigen-binding fragments thereof that immunospecifically bind to one or more RSV antigens and/or one or more hMPV antigens is achieved at least 30 days after administering a first dose of approximately 5 mg/kg, 10 mg/kg, 15 mg/kg, 20 mg/kg, 25 mg/kg, or 30 mg/kg of the antibodies or antigen-binding fragments thereof to the primate. In accordance with these embodiments, the primate is preferably a human.

[0485] The present invention provides methods for preventing, treating, or ameliorating one or more symptoms associated with a respiratory viral infection in a mammal, preferably a human, said methods comprising administering a first dose to said mammal of (i) a prophylactically or therapeutically effective amount of one or more antibodies or antigen-binding fragments thereof that immunospecifically bind to one or more RSV antigens, and (ii) a prophylactically or therapeutically effective amount of one or more antibodies or antigen-binding fragments thereof that immunospecifically bind to one or more hMPV antigens, wherein said effective amount is less than 1.5 mg/kg, 8 mg/kg, 15 mg/kg, 50 mg/kg, or less than 100 mg/kg or approximately this amount of said antibodies or antigen-binding fragments thereof and which results in a serum titer of greater than 40 μg/ml 30 days after the first administration and prior to any subsequent administration. In one embodiment, the respiratory viral infection in a human subject is prevented or treated, or one or more symptoms associated with the respiratory viral infection is ameliorated by administering (i) a first dose of less than 20 mg/kg, 15 mg/kg, 10 mg/kg, preferably less than 5 mg/kg, less than 3 mg/kg, or less than 1 mg/kg or approximately this amount of one or more antibodies or antigen-binding fragments thereof that immunospecifically bind to one or more RSV antigens; and (ii) a second dose of less than 20 mg/kg, 15 mg/kg, 10 mg/kg, less than 5 mg/kg, less than 3 mg/kg, or less than 1 mg/kg or approximately this amount of one or more antibodies or antigen-binding fragments thereof that immunospecifically bind to one or more hMPV antigens so that a serum antibody titer of at least 40 μg/ml, at least 80 μg/ml, or at least 120 μg/ml, at least 150 μg/ml, at least 200 μg/ml, at least 250 μg/ml, or at least 300 μg/ml is achieved 30 days after the administration of the first dose of the antibodies or antibody fragments and prior to the administration of a subsequent dose. In another embodiment, a respiratory infection in a human subject is prevented or treated, or one or more symptoms associated with a respiratory viral infection is ameliorated by administering a first dose of approximately 15 mg/kg of (i) one or more antibodies or antigen-binding fragments thereof that immunospecifically bind to one or more RSV antigens; and (ii) one or more antibodies or antigen-binding fragments thereof that immunospecifically bind to one or more RSV antigens so that a serum antibody titer of at least 10 μg/ml, 25 μg/ml, 50 μg/ml, 75 μg/ml, or at least 100 μg/ml, at least 200 μg/ml, at least 250 μg/ml, at least 300 μg/ml, at least 350 μg/ml, or at least 400 μg/ml is achieved 30 days after the administration of the first dose of the antibodies or antibody fragments and prior to the administration of a subsequent dose.

[0486] In certain embodiments, the respiratory viral infection is an infection with RSV and/or hMPV.

[0487] In certain embodiments of the invention, the fragments of the antibodies, i.e., the one or more antibodies that bind immunospecifically to a RSV antigen and/or the one or more antibodies that bind immunospecifically to a hMPV antigen comprise a variable heavy (“VH”) domain.

[0488] In certain embodiments of the invention, the fragments of the one or more antibodies that bind immunospecifically to a RSV antigen and/or the fragments of the one or more antibodies that bind immunospecifically to a hMPV antigen comprise a variable light (“VL”).

[0489] In certain embodiments, at least one of the fragments or the antibodies comprises a VH domain and a VL domain.

[0490] In certain embodiments of the invention, the antibodies are administered via sustained release formulations.

[0491] In certain embodiments the one or more antibodies or antigen-binding fragments thereof that bind immunospecifically to one or more RSV antigens (hereafter “anti-RSV-antigen antibodies or antigen-binding fragments thereof”) and the one or more antibodies that bind immunospecifically to one or more hMPV antigens (hereafter “anti-hMPV-antigen antibodies or antigen-binding fragments thereof”) are administered concurrently. In certain, more specific embodiments, the antibodies are administered concurrently via the same route, e.g., but not limited to, intravenous or intramuscular. In certain other embodiments, the antibodies are administered concurrently via different routes.

[0492] In certain other embodiments, the anti-RSV-antigen antibodies or antigen-binding fragments thereof are administered prior to the administration of the anti-hMPV-antigen antibodies or antigen-binding fragments thereof. In certain other embodiments, the anti-hMPV-antigen antibodies or antigen-binding fragments thereof are administered prior to the administration of the anti-RSV-antigen antibodies or antigen-binding fragments thereof.

[0493] In certain embodiments, the anti-RSV-antigen antibodies or antigen-binding fragments thereof are administered in a sequence of individual administrations separated by a time period and the anti-hMPV-antigen antibodies or antigen-binding fragments thereof are administered prior to, concurrently with, or subsequent to the sequence of administering the anti-RSV-antigen antibodies. In certain embodiments, the anti-hMPV-antigen antibodies or antigen-binding fragments thereof are administered in a sequence of individual administrations separated by a time period and the anti-RSV-antigen antibodies or antigen-binding fragments thereof are administered prior to, concurrently with, or subsequent to the sequence of administering the anti-hMPV-antigen antibodies. In certain embodiments, the time period is 1 day, 2 days, 3 days, 4 days, 5 days, 6 days, 1 week, 2 weeks, 3 weeks, 1 month, 2 months, or 3 months.

[0494] In certain embodiments, both the anti-RSV-antigen antibodies or antigen-binding fragments thereof and the anti-hMPV-antigen antibodies or antigen-binding fragments thereof are administered in a sequence of individual administrations separated by a time period. In certain more specific embodiments, the two sequences of administrations are in phase with each other. In other embodiments, the two sequences are out-of-phase with each other.

[0495] The present invention provides compositions comprising (i) one or more antibodies or antigen-binding fragments thereof that immunospecifically bind to one or more RSV antigens, and (ii) one or more antibodies or antigen-binding fragments thereof that bind immunospecifically to one or more hMPV antigen. In certain embodiments, the pharmaceutical composition further comprises a pharmaceutically acceptable carrier.

[0496] In certain embodiments, administration of the same antibody may be repeated and the administrations may be separated by at least 10 days, 15 days, 30 days, 2 months, 3 months, or at least 6 months. In certain embodiments, administration of the same antibody may be repeated and the administrations may be separated by at most 10 days, 15 days, 30 days, 2 months, 3 months, or at least 6 months.

[0497] 4.2.3 Combination Prophylaxis and Therapy of Anti-PIV-Antigen Antibodies and Anti-hMPV-Antigen Antibodies

[0498] The present invention provides methods of preventing and/or treating and ameliorating one or more symptoms associated with a respiratory viral infection in a subject comprising administering to said subject (i) one or more first antibodies or antigen-binding fragments thereof which immunospecifically bind to one or more PIV antigens; and (ii) one or more second antibodies or antigen-binding fragments thereof which immunospecifically bind to one or more hMPV antigens. In a specific embodiment, the subject is a human infected with PIV and hMPV. In a specific embodiment, the method prevents a subject from infection with PIV and hMPV. In a specific embodiment, the subject is susceptible to PIV and hMPV infection.

[0499] In certain embodiments, the one or more first antibodies neutralize PIV. In certain embodiments, the one or more first antibodies neutralize at least 25%, at least 30%, at least 35%, at least 40%, at least 45%, at least 50%, at least 55%, at least 60%, at least 65%, at least 70%, at least 75%, at least 80%, at least 85%, at least 90%, at least 95%, at least 98% or at least 99% of the PIV in an in vitro microneutralization assay (see below). In certain embodiments, the one or more first antibodies neutralize at least 25%, at most 30%, at most 35%, at most 40%, at most 45%, at most 50%, at most 55%, at most 60%, at most 65%, at most 70%, at most 75%, at most 80%, at most 85%, at most 90%, at most 95%, at most 98% or at most 99% of the PIV in an in vitro microneutralization assay (as described in section 4.8.4).

[0500] In certain embodiments, the one or more second antibodies neutralize hMPV. In certain embodiments, the one or more second antibodies neutralize at least 25%, at least 30%, at least 35%, at least 40%, at least 45%, at least 50%, at least 55%, at least 60%, at least 65%, at least 70%, at least 75%, at least 80%, at least 85%, at least 90%, at least 95%, at least 98% or at least 99% of the hMPV in an in vitro microneutralization assay (see below). In certain embodiments, the one or more first antibodies neutralize at least 25%, at most 30%, at most 35%, at most 40%, at most 45%, at most 50%, at most 55%, at most 60%, at most 65%, at most 70%, at most 75%, at most 80%, at most 85%, at most 90%, at most 95%, at most 98% or at most 99% of the hMPV in an in vitro microneutralization assay.

[0501] In certain embodiments, at least one of the one or more antibodies that bind immunospecifically to a PIV antigen is a high affinity and/or high avidity antibody and/or has a longer serum half-life. In certain embodiments, at least one of the one or more antibodies that bind immunospecifically to a hMPV antigen is a high affinity and/or high avidity antibody and/or has a longer serum half-life.

[0502] The high affinity and/or high avidity of the antibodies of the invention enable the use of lower doses of the antibodies compared to non-high affinity or non-high avidity for the amelioration of symptoms associated with PIV infection and/or hMPV infection. The use of lower doses of antibodies which immunospecifically bind to one or more PIV antigens and the use of lower doses of antibodies which immunospecifically bind to one or more hMPV antigens reduces the likelihood of adverse effects, as well as providing a more effective prophylaxis. Further, high affinity and/or high avidity of the antibodies enable less frequent administration of said antibodies than previously thought to be necessary for the prevention, neutralization, treatment and the amelioration of symptoms associated with PIV infection and hMPV infection, respectively.

[0503] In certain embodiments, the one or more antibodies that bind immunospecifically to a PIV antigen and/or the one or more antibodies that bind immunospecifically to a hMPV antigen can be administered directly to the site of PIV infection. In particular, at least one of the antibodies can be administered by pulmonary delivery. Such a mode of administration can reduce the dosage and frequency of administration of the antibodies to a subject.

[0504] In certain embodiments, the serum titer of at least one of the administered antibodies is 1 μg/ml or less, 2 μg/ml or less, 5 μg/ml or less, 6 μg/ml or less, 10 μg/ml or less, 15 μg/ml or less, 20 μg/ml or less, 25 μg/ml or less, 100 μg/ml or less, or 250 μg/ml or less. In certain embodiments, the serum titer of at least one of the administered antibodies is at least 1 μg/ml, at least 2 μg/ml, at least 5 μg/ml, at least 6 μg/ml, at least 10 μg/ml, at least 15 μg/ml, at least 20 μg/ml, at least 25 μg/ml, at least 50 μg/ml, at least 100 μg/ml, at least 125 μg/ml, at least 150 g/ml, at least 175 μg/ml, at least 200 μg/ml, at least 225 μg/ml, at least 250 μg/ml, at least 275 μg/ml, at least 300 μg/ml, at least 325 μg/ml, at least 350 μg/ml, at least 375 μg/ml, or at least 400 μg/ml. Preferably a serum titer or serum titer of 1 μg/ml or less, 2 μg/ml or less, 5 μg/ml or less, 6 μg/ml or less, 10 μg/ml or less, 15 μg/ml or less, 20 μg/ml or less, or 25 μg/ml or less is achieved approximately 20 days (preferably 25, 30, 35 or 40 days) after administration of a first dose of antibodies or antigen-binding fragments thereof which immunospecifically bind to a PIV antigen and/or to a hMPV antigen and without administration of any other doses of said antibodies or antigen-binding fragments thereof. Preferably a serum titer or serum titer of at least 1 μg/ml, at least 2 μg/ml, at least 5 μg/ml, at least 6 μg/ml, at least 10 μg/ml, at least 15 μg/ml, at least 20 μg/ml, at least 25 μg/ml, at least 50 μg/ml, at least 100 μg/ml, at least 125 μg/ml, at least 150 μg/ml, at least 175 μg/ml, at least 200 μg/ml, at least 225 μg/ml, at least 250 μg/ml, at least 275 μg/ml, at least 300 μg/ml, at least 325 μg/ml, at least 350 μg/ml, at least 375 μg/ml, or at least 400 μg/ml is achieved approximately 20 days (preferably 25, 30, 35 or 40 days) after administration of a first dose of antibodies or antigen-binding fragments thereof which immunospecifically bind to a PIV antigen and/or to a hMPV antigen and without administration of any other doses of said antibodies or antigen-binding fragments thereof.

[0505] In specific embodiments, a serum titer in a non-primate mammal of at least 0.4 μg/ml, 1 μg/ml, 4 μg/ml, 10 μg/ml, 40 μg/ml, at least 80 μg/ml, at least 100 μg/ml, at least 120 μg/ml, at least 150 μg/ml, at least 200 μg/ml, at least 250 μg/ml, or at least 300 μg/ml, of one or more antibodies or antigen-binding fragments thereof that immunospecifically bind to a PIV antigen and/or of one or more antibodies or antigen-binding fragments thereof that bind immunospecifically to a hMPV antigen is achieved at least 1 day after administering a dose of less than 100 mg/kg, 50 mg/kg, 10 mg/kg, less than 2.5 mg/kg, less than 1 mg/kg, or less than 0.5 mg/kg of the antibodies or antibody fragments to the non-primate mammal. In another embodiment, a serum titer in a non-primate mammal of at least 150 μg/ml, at least 200 μg/ml, at least 250 μg/ml, at least 300 μg/ml, at least 350 μg/ml, or at least 400 μg/ml of one or more antibodies or antigen-binding fragments thereof that immunospecifically bind to one or more PIV antigens and/or that bind immunospecifically to a hMPV antigen is achieved at least 1 day after administering a dose of approximately 5 mg/kg of the antibodies or antibody fragments to the non-primate mammal.

[0506] In another embodiment, a serum titer in a primate of at least 0.4 μg/ml, 1 μg/ml, 4 μg/ml, 10 μg/ml, 40 μg/ml, preferably at least 80 μg/ml, at least 100 μg/ml, at least 120 μg/ml, at least 150 μg/ml, at least 200 μg/ml, at least 250 μg/ml, or at least 300 μg/ml of one or more antibodies or antigen-binding fragments thereof that immunospecifically bind to one or more PIV antigens and/or to one or more hMPV antigens is achieved at least 30 days after administering a first dose of less than 5 mg/kg, preferably less than 3 mg/kg, less than 1 mg/kg, or less than 0.5 mg/kg of the antibodies or antigen-binding fragments thereof to the primate. In yet another embodiment, a serum titer in a primate of at least 200 μg/ml, at least 250 μg/ml, at least 300 μg/ml, at least 350 μg/ml, or at least 400 μg/ml of one or more antibodies or antigen-binding fragments thereof that immunospecifically bind to one or more PIV antigens and/or one or more hMPV antigens is achieved at least 30 days after administering a first dose of approximately 15 mg/kg of the antibodies or antigen-binding fragments thereof to the primate. In accordance with these embodiments, the primate is preferably a human.

[0507] The present invention provides methods for preventing, treating, or ameliorating one or more symptoms associated with a respiratory viral infection in a mammal, preferably a human, said methods comprising administering a first dose to said mammal of (i) a prophylactically or therapeutically effective amount of one or more antibodies or antigen-binding fragments thereof that immunospecifically bind to one or more PIV antigens, and (ii) a prophylactically or therapeutically effective amount of one or more antibodies or antigen-binding fragments thereof that immunospecifically bind to one or more hMPV antigens, wherein said effective amount is less than 1.5 mg/kg, 15 mg/kg, 50 mg/kg, or 100 mg/kg or approximately this amount of said antibodies or antigen-binding fragments thereof and which results in a serum titer of greater than 0.4 μg/ml, 1 μg/ml, 4 μg/ml, 10 μg/ml, 40 μg/ml 30 days after the first administration and prior to any subsequent administration. In one embodiment, the respiratory viral infection in a human subject is prevented or treated, or one or more symptoms associated with the respiratory viral infection is ameliorated by administering (i) a first dose of less than 100 mg/kg or less than 10 mg/kg, about 15 mg/kg less than 5 mg/kg, less than 3 mg/kg, or less than 1 mg/kg or approximately this amount of one or more antibodies or antigen-binding fragments thereof that immunospecifically bind to one or more PIV antigens; and (ii) a first dose of less than 10 mg/kg, about 15 mg/kg less than 5 mg/kg, less than 3 mg/kg, or less than 1 mg/kg or approximately this amount of one or more antibodies or antigen-binding fragments thereof that immunospecifically bind to one or more hMPV antigens so that a serum antibody titer of at least 0.4 μg/ml, 1 μg/ml, 4 μg/ml, 10 μg/ml, 40 μg/ml, preferably at least 80 μg/ml, or at least 120 μg/ml, at least 150 μg/ml, at least 200 μg/ml, at least 250 μg/ml, or at least 300 μg/ml is achieved 30 days after the administration of the first dose of the antibodies or antibody fragments and prior to the administration of a subsequent dose. In another embodiment, a respiratory infection in a human subject is prevented or treated, or one or more symptoms associated with a respiratory viral infection is ameliorated by administering a first dose of approximately 15 mg/kg of (i) one or more antibodies or antigen-binding fragments thereof that immunospecifically bind to one or more PIV antigens; and (ii) one or more antibodies or antigen-binding fragments thereof that immunospecifically bind to one or more PIV antigens so that a serum antibody titer of at least 1 μg/ml, 5 μg/ml, 10 μg/ml, 50 μg/ml, 75 μg/ml, or at least 100 μg/ml, at least 200 μg/ml, at least 250 μg/ml, at least 300 μg/ml, at least 350 μg/ml, or at least 400 μg/ml is achieved 30 days after the administration of the first dose of the antibodies or antibody fragments and prior to the administration of a subsequent dose.

[0508] In certain embodiments, the respiratory viral infection is an infection with PIV and hMPV.

[0509] In certain embodiments of the invention, the fragments of the antibodies, i.e., the one or more antibodies that bind immunospecifically to a PIV antigen and/or the one or more antibodies that bind immunospecifically to a hMPV antigen comprise a variable heavy (“VH”) domain.

[0510] In certain embodiments of the invention, the fragments of the one or more antibodies that bind immunospecifically to a PIV antigen and/or the fragments of the one or more antibodies that bind immunospecifically to a hMPV antigen comprise a variable light (“VL”).

[0511] In certain embodiments, at least one of the fragments or the antibodies comprises a VH domain and a VL domain.

[0512] In certain embodiments of the invention, the antibodies are administered via sustained release formulations.

[0513] In certain embodiments the one or more antibodies or antigen-binding fragments thereof that bind immunospecifically to one or more PIV antigens (hereafter “anti-PIV-antigen antibodies or antigen-binding fragments thereof”) and the one or more antibodies that bind immunospecifically to one or more hMPV antigens (hereafter “anti-hMPV-antigen antibodies or antigen-binding fragments thereof”) are administered concurrently. In certain, more specific embodiments, the antibodies are administered concurrently via the same route, e.g., but not limited to, intravenous or intramuscular. In certain other embodiments, the antibodies are administered concurrently via different routes.

[0514] In certain other embodiments, the anti-PIV-antigen antibodies or antigen-binding fragments thereof are administered prior to the administration of the anti-hMPV-antigen antibodies or antigen-binding fragments thereof. In certain other embodiments, the anti-hMPV-antigen antibodies or antigen-binding fragments thereof are administered prior to the administration of the anti-PIV-antigen antibodies or antigen-binding fragments thereof.

[0515] In certain embodiments, the anti-PIV-antigen antibodies or antigen-binding fragments thereof are administered in a sequence of individual administrations separated by a time period and the anti-hMPV-antigen antibodies or antigen-binding fragments thereof are administered prior to, concurrently with, or subsequent to the sequence of administering the anti-PIV-antigen antibodies. In certain embodiments, the anti-hMPV-antigen antibodies or antigen-binding fragments thereof are administered in a sequence of individual administrations separated by a time period and the anti-PIV-antigen antibodies or antigen-binding fragments thereof are administered prior to, concurrently with, or subsequent to the sequence of administering the anti-hMPV-antigen antibodies. In certain embodiments, the time period is 1 day, 2 days, 3 days, 4 days, 5 days, 6 days, 1 week, 2 weeks, 3 weeks, 1 month, 2 months, or 3 months.

[0516] In certain embodiments, both the anti-PIV-antigen antibodies or antigen-binding fragments thereof and the anti-hMPV-antigen antibodies or antigen-binding fragments thereof are administered in a sequence of individual administrations separated by a time period. In certain more specific embodiments, the two sequences of administrations are in phase with each other. In other embodiments, the two sequences are out-of-phase with each other.

[0517] The present invention provides compositions comprising (i) one or more antibodies or antigen-binding fragments thereof that immunospecifically bind to one or more PIV antigens, and (ii) one or more antibodies or antigen-binding fragments thereof that bind immunospecifically to one or more hMPV antigen. In certain embodiments, the pharmaceutical compositions further comprise a pharmaceutically acceptable carrier.

[0518] In certain embodiments, administration of the same antibody may be repeated and the administrations may be separated by at least 10 days, 15 days, 30 days, 2 months, 3 months, or at least 6 months. In certain embodiments, administration of the same antibody may be repeated and the administrations may be separated by at most 10 days, 15 days, 30 days, 2 months, 3 months, or at least 6 months.

[0519] 4.3 Prophylactic and Therapeutic Uses of Antibodies

[0520] Antibodies to be used with the methods of the invention are anti-RSV-antigen antibodies, anti-PIV-antigen antibodies, and/or anti-hMPV-antigen antibodies.

[0521] The present invention is directed to antibody-based therapies which involve administering antibodies or antigen-binding fragments thereof to a mammal, preferably a human, for preventing, treating, or ameliorating one or more symptoms associated with a RSV, PIV, and/or hMPV infection. In particular, the methods of the invention comprise (i) administering one or more anti-RSV-antigen antibodies or antigen-binding fragments thereof and one or more anti-PIV-antigen antibodies or antigen-binding fragments thereof; (ii) administering one or more anti-PIV-antigen antibodies or antigen-binding fragments thereof and one or more anti-hMPV-antigen antibodies or antigen-binding fragments thereof; or (iii) administering one or more anti-RSV-antigen antibodies or antigen-binding fragments thereof, one or more anti-PIV-antigen antibodies or antigen-binding fragments thereof, and one or more anti-hMPV-antigen antibodies or antigen-binding fragments thereof. Prophylactic and therapeutic compositions of the invention include, but are not limited to, (i) one or more anti-RSV-antigen antibodies or antigen-binding fragments thereof and one or more anti-PIV-antigen antibodies or antigen-binding fragments thereof; (ii) one or more anti-PIV-antigen antibodies or antigen-binding fragments thereof and one or more anti-hMPV-antigen antibodies or antigen-binding fragments thereof; or (iii) one or more anti-RSV-antigen antibodies or antigen-binding fragments thereof, one or more anti-PIV-antigen antibodies or antigen-binding fragments thereof, and one or more anti-hMPV-antigen antibodies or antigen-binding fragments thereof. Antibodies to be used with the methods of the invention or fragments thereof may be provided in pharmaceutically acceptable compositions as known in the art or as described herein.

[0522] Antibodies or antigen-binding fragments thereof which do not prevent RSV, PIV, and/or hMPV from binding its host cell receptor but inhibit or downregulate RSV, PIV, and/or hMPV replication can also be administered to a mammal to treat, prevent or ameliorate one or more symptoms associated with a respiratory infection. The ability of an antibody or fragment thereof to inhibit or downregulate RSV, PIV, and/or hMPV replication may be determined by techniques described herein or otherwise known in the art. For example, the inhibition or downregulation of RSV, PIV, and/or hMPV replication can be determined by detecting the RSV titer in the lungs of a mammal, preferably a human.

[0523] In a specific embodiment, an antibody to be used with the methods of the invention or fragments thereof inhibit or downregulates RSV, PIV, and/or hMPV replication by at least 99%, at least 95%, at least 90%, at least 85%, at least 80%, at least 75%, at least 70%, at least 60%, at least 50%, at least 45%, at least 40%, at least 45%, at least 35%, at least 30%, at least 25%, at least 20%, or at least 10% relative to RSV, PIV, and/or hMPV replication, respectively, in absence of said antibodies or antibody fragments. In another embodiment, a combination of antibodies, a combination of antibody fragments, or a combination of antibodies and antibody fragments inhibit or downregulate a RSV, PIV, and/or hMPV replication, respectively, by at least 99%, at least 95%, at least 90%, at least 85%, at least 80%, at least 75%, at least 70%, at least 60%, at least 50%, at least 45%, at least 40%, at least 45%, at least 35%, at least 30%, at least 25%, at least 20%, or at least 10% relative to RSV replication in absence of said antibodies and/or antibody fragments.

[0524] One or more antibodies of the present invention or fragments thereof that immunospecifically bind to one or more RSV antigens, one or more PIV antigens, and/or one or more hMPV antigens may be used locally or systemically in the body as a therapeutic. The antibodies to be used with the methods of this invention or fragments thereof may also be advantageously utilized in combination with other monoclonal or chimeric antibodies, or with lymphokines or hematopoietic growth factors (such as, e.g., IL-2, IL-3 and IL-7), which, for example, serve to increase the number or activity of effector cells which interact with the antibodies. The antibodies to be used with the methods of this invention or fragments thereof may also be advantageously utilized in combination with other monoclonal or chimeric antibodies, or with lymphokines or hematopoietic growth factors (such as, e.g., IL-2, IL-3 and IL-7), which, for example, serve to increase the immune response. The antibodies to be used with the methods of this invention or fragments thereof may also be advantageously utilized in combination with one or more drugs used to treat RSV infection such as, for example anti-viral agents. Antibodies to be used with the methods of the invention or fragments may be used in combination with one or more of the following drugs: NIH-351 (Gemini Technologies), RSVf-2 (Intracel), F-50042 (Pierre Fabre), T-786 (Trimeris), VP-36676 (ViroPharma), RFI-641 (American Home Products), VP-14637 (ViroPharma), PFP-1 and antiviral PFP-2 (American Home Products), RSV vaccine (Avant Immunotherapeutics), and F-50077 (Pierre Fabre). In certain embodiments, antibodies to be used with the methods of the invention or fragments may be used in combination with the high affinity human monoclonal antibodies specific to RSV F-protein as disclosed in U.S. Pat. No. 5,811,524, by Brams et al., issued Sep. 22, 1998, which is incorporated herein by reference in its entirety.

[0525] The antibodies to be used with the methods of the invention may be administered alone or in combination with other types of treatments (e.g., hormonal therapy, immunotherapy, and anti-inflammatory agents). Generally, administration of products of a species origin or species reactivity (in the case of antibodies) that is the same species as that of the patient is preferred. Thus, in a preferred embodiment, human or humanized antibodies, fragments derivatives, analogs, or nucleic acids, are administered to a human patient for therapy or prophylaxis.

[0526] In certain embodiments, high affinity and/or potent in vivo inhibiting antibodies and/or neutralizing antibodies that immunospecifically bind to a RSV, PIV, and/or hMPV antigen, for both immunoassays directed to RSV, PIV, and/or hMPV, prevention of RSV, PIV, and/or hMPV infection and therapy for RSV, PIV, and/or hMPV infection are used.

[0527] In certain embodiments, the therapeutic and/or prophylactic methods of the invention are used to treat, prevent or ameliorate one or more symptoms associated with a respiratory viral infection in a human with cystic fibrosis, bronchopulmonary dysplasia, congenital heart disease, congenital immunodeficiency or acquired immunodeficiency, or to a human who has had a bone marrow transplant. In certain embodiments, the respiratory viral infection is an infection with RSV, PIV, and/or hMPV. In certain embodiments, the therapeutic and/or prophylactic methods of the invention are used to treat, prevent or ameliorate one or more symptoms associated with a respiratory viral infection in a human infant, preferably a human infant born prematurely or a human infant at risk of hospitalization for RSV infection to treat, prevent or ameliorate one or more symptoms associated with RSV infection. In certain embodiments, the therapeutic and/or prophylactic methods of the invention are used to treat, prevent or ameliorate one or more symptoms associated with a respiratory viral infection in the elderly or people in group homes (e.g., nursing homes or rehabilitation centers).

[0528] In certain embodiments of the invention, the target population for the therapeutic methods of the invention is defined by age. In certain embodiments, the target population for the therapeutic methods of the invention is characterized by a disease or disorder in addition to a respiratory tract infection.

[0529] In a specific embodiment, the target population encompasses young children, below 2 years of age. In a more specific embodiment, the children below the age of 2 years do not suffer from illnesses other than respiratory tract infection.

[0530] In other embodiments, the target population encompasses patients above 5 years of age. In a more specific embodiment, the patients above the age of 5 years suffer from an additional disease or disorder including cystic fibrosis, leukaemia, and non-Hodgkin lymphoma, or recently received bone marrow or kidney transplantation.

[0531] In a specific embodiment of the invention, the target population encompasses subjects in which the hMPV infection is associated with immunosuppression of the hosts. In a specific embodiment, the subject is an immunocompromised individual. In a specific embodiment, a subject to be treated with the methods of the invention is also infected with HIV.

[0532] In a specific embodiments, the subject to be treated with the methods of the invention has been diagnosed with severe respiratory syncytial virus bronchilitis. Without being bound by theory, an individual diagnosed with severe respiratory syncytial virus is also likely to be infected with hMPV. In a specific embodiments, the subject to be treated with the methods of the invention has been diagnosed with acute respiratory tract illness.

[0533] In certain embodiments, the target population for the methods of the invention encompasses the elderly.

[0534] In a specific embodiment, the subject to be treated or diagnosed with the methods of the invention was infected with hMPV in the winter months.

[0535] In certain embodiments, an effective amount of the anti-RSV-antigen antibodies, anti-PIV-antigen antibodies, and/or anti-hMPV-antigen antibodies or antibody fragments thereof reduces the RSV, PIV, and/or hMPV titers in the lung as measured, for example, by the concentration of RSV, PIV, and/or hMPV in sputum samples or a lavage from the lungs from a mammal. In certain embodiments, an effective amount of an antibody to be used with the invention is sufficient to induce an immune response in the mammal.

[0536] In certain embodiments, the antibodies to be used with the methods of the invention are administered via sustained release formulations.

[0537] In certain embodiments, an antibody to be used with the methods of the invention binds to a heptad repeat. In certain embodiments, an antibody to be used with the methods of the invention binds to a heptad repeat of RSV, PIV, or hMPV. In certain embodiments, an antibody to be used with the methods of the invention binds to a heptad repeat of the F protein of RSV, PIV, or hMPV. In certain, more specific embodiments, an antibody to be used with the methods of the invention binds to a heptad repeat of the F protein of a mammalian metapneumovirus (e.g., hMPV). In certain, even more specific embodiments, an antibody to be used with the methods of the invention binds to heptad repeat 1 or heptad repeat 2 of the F protein of a mammalian metapneumovirus (e.g., hMPV).

[0538] In certain embodiments of the invention, an antibody that immunospecifically binds to an antigen of hMPV of subgroup A or subgroup B can be used with the methods of the invention. In certain embodiments of the invention, an antibody that immunospecifically binds to an antigen of hMPV of variant A1, A2, B1 or B2.

[0539] 4.3.1 Methods of Administration of Antibodies

[0540] The invention provides methods of treatment, prophylaxis, and amelioration of one or more symptoms associated with respiratory viral infection by administrating to a subject of an effective amount of one or more antibodies or fragment thereof, or pharmaceutical is composition comprising one or more antibodies of the invention or fragment thereof. In particular, the antibodies to be used with the methods of the invention are administered as a mixture, e.g., a composition comprising anti-RSV-antigen antibodies, anti-PIV-antigen antibodies, and/or anti-hMPV-antigen antibodies, or any combination thereof. In a preferred aspect, an antibody or fragment thereof is substantially purified (i.e., substantially free from substances that limit its effect or produce undesired side-effects). The subject is preferably a mammal such as non-primate (e.g., cows, pigs, horses, cats, dogs, rats etc.) and a primate (e.g., monkey such as a cynomolgous monkey and a human). In a preferred embodiment, the subject is a human. In another preferred embodiment, the subject is a human infant or a human infant born prematurely. In more specific embodiments, the prematurely born infant was born between 30-35 weeks gestational age or between 35-40 weeks of gestational age. In a preferred embodiment, the prematurely born infant was born between 32 and 35 weeks of gestational age. In certain other embodiments, the prematurely born infant was born at less than 32 weeks gestational age. In certain other embodiments, the prematurely born infant was born at 35-38 weeks gestational age. In other embodiments, the subject is an infant born at 38-40 weeks gestational age or greater than 40 weeks gestational age. In another embodiment, the subject is a human with cystic fibrosis, bronchopulmonary dysplasia, congenital heart disease, congenital immunodeficiency or acquired immunodeficiency, a human who has had a bone marrow transplant, or an elderly human.

[0541] Various delivery systems are known and can be used to administer an antibody or an antigen-binding fragment thereof, e.g., encapsulation in liposomes, microparticles, microcapsules, recombinant cells capable of expressing the antibody or antibody fragment, receptor-mediated endocytosis (see, e.g., Wu and Wu, J. Biol. Chem. 262:4429-4432 (1987)), construction of a nucleic acid as part of a retroviral or other vector, etc. Methods of administering an antibody or fragment thereof, or pharmaceutical composition include, but are not limited to, parenteral administration (e.g., intradermal, intramuscular, intraperitoneal, intravenous and subcutaneous), epidural, and mucosal (e.g., intranasal and oral routes). In a specific embodiment, antibodies or antigen-binding fragments thereof, or pharmaceutical compositions are administered intramuscularly, intravenously, or subcutaneously. The compositions may be administered by any convenient route, for example by infusion or bolus injection, by absorption through epithelial or mucocutaneous linings (e.g., oral mucosa, rectal and intestinal mucosa, etc.) and may be administered together with other biologically active agents. Administration can be systemic or local. In addition, pulmonary administration can also be employed, e.g., by use of an inhaler or nebulizer, and formulation with an aerosolizing agent. See, e.g., U.S. Pat. Nos. 6,019,968, 5,985, 320, 5,985,309, 5,934,272, 5,874,064, 5,855,913, 5,290,540, and 4,880,078; and PCT Publication Nos. WO 92/19244, WO 97/32572, WO 97/44013, WO 98/31346, and WO 99/66903, each of which is incorporated herein by reference their entirety. In a preferred embodiment, an antibody or fragment thereof, or composition comprising the antibodies to be used with the methods of the invention using Alkermes AIR™ pulmonary drug delivery technology (Alkermes, Inc., Cambridge, Mass.).

[0542] In certain embodiments, an antibody or fragment thereof is packaged in a hermetically sealed container such as an ampoule or sachette indicating the quantity of antibody or antibody fragment. In one embodiment, each antibody or antibody fragment or combination thereof is supplied as a dry sterilized lyophilized powder or water free concentrate in a hermetically sealed container and can be reconstituted, e.g., with water or saline to the appropriate concentration for administration to a subject. For stabilized liquid antibody formulations, see U.S. Provisional Patent Application Nos.: 60/388,920, filed on Jun. 14, 2002, and 60/388,921, filed Jun. 14, 2002, which are incorporated by reference herein in their entireties. Preferably, each antibody or antibody fragment or combination thereof is supplied as a dry sterile lyophilized powder in a hermetically sealed container at a unit dosage for each antibody of at least 5 mg, more preferably at least 10 mg, at least 15 mg, at least 25 mg, at least 35 mg, at least 45 mg, at least 50 mg, or at least 75 mg. Each lyophilized antibody or antibody fragment or combination thereof should be stored at between 2 and 8° C. in its original container and the antibody or antibody fragment should be administered within 12 hours, preferably within 6 hours, within 5 hours, within 3 hours, or within 1 hour after being reconstituted. In an alternative embodiment, an antibody or fragment thereof is supplied in liquid form in a hermetically sealed container indicating the quantity and concentration of the antibody or antibody fragment. Preferably, the liquid form of the antibody or fragment thereof or combination thereof is supplied in a hermetically sealed container at a concentration for each antibody least 1 mg/ml, more preferably at least 2.5 mg/ml, at least 5 mg/ml, at least 8 mg/ml, at least 10 mg/ml, at least 15 mg/ml, at least 25 mg/ml, at least 50 mg/ml, at least 100 mg/ml, at least 125 mg/ml, at least 150 mg/ml, at least 200 mg/ml, or at least 250 mg/ml, or approximately 2.5 mg/ml, 5 mg/ml, 8 mg/ml, 10 mg/ml, 15 mg/ml, 25 mg/ml, 50 mg/ml, 100 mg/ml, 125 mg/ml, 150 mg/ml, 200 mg/ml, or 250 mg/ml.

[0543] In a specific embodiment, it may be desirable to administer the antibodies locally to the area in need of treatment; this may be achieved by, for example, and not by way of limitation, local infusion, by injection, or by means of an implant, said implant being of a porous, non-porous, or gelatinous material, including membranes, such as sialastic membranes, or fibers. Preferably, when administering a an antibody or fragment thereof, care must be taken to use materials to which the antibody or antibody fragment does not absorb. In a specific embodiment, the antibodies may be administered by pulmonary delivery.

[0544] In another embodiment, an antibody can be delivered in a vesicle, in particular a liposome (see Langer, Science 249:1527-1533 (1990); Treat et al., in Liposomes in the Therapy of Infectious Disease and Cancer, Lopez-Berestein and Fidler (eds.), Liss, New York, pp. 353-365 (1989); Lopez-Berestein, ibid., pp. 317-327; see generally ibid.).

[0545] In yet another embodiment, an antibody can be delivered in a controlled release or sustained release system. In one embodiment, a pump may be used to achieve controlled or sustained release (see Langer, supra; Sefton, 1987, CRC Crit. Ref. Biomed. Eng. 14:20; Buchwald et al., 1980, Surgery 88:507; Saudek et al., 1989, N. Engl. J. Med. 321:574). In another embodiment, polymeric materials can be used to achieve controlled or sustained release of the antibodies of the invention or fragments thereof (see e.g., Medical Applications of Controlled Release, Langer and Wise (eds.), CRC Pres., Boca Raton, Fla. (1974); Controlled Drug Bioavailability, Drug Product Design and Performance, Smolen and Ball (eds.), Wiley, New York (1984); Ranger and Peppas, 1983, J., Macromol. Sci. Rev. Macromol. Chem. 23:61; see also Levy et al., 1985, Science 228:190; During et al., 1989, Ann. Neurol. 25:351; Howard et al., 1989, J. Neurosurg. 7 1:105); U.S. Pat. No. 5,679,377; U.S. Pat. No. 5,916,597; U.S. Pat. No. 5,912,015; U.S. Pat. No. 5,989,463; U.S. Pat. No. 5,128,326; PCT Publication No. WO 99/15154; and PCT Publication No. WO 99/20253. Examples of polymers used in sustained release formulations include, but are not limited to, poly(2-hydroxy ethyl methacrylate), poly(methyl methacrylate), poly(acrylic acid), poly(ethylene-co-vinyl acetate), poly(methacrylic acid), polyglycolides (PLG), polyanhydrides, poly(N-vinyl pyrrolidone), poly(vinyl alcohol), polyacrylamide, poly(ethylene glycol), polylactides (PLA), poly(lactide-co-glycolides) (PLGA), and polyorthoesters. In a preferred embodiment, the polymer used in a sustained release formulation is inert, free of leachable impurities, stable on storage, sterile, and biodegradable. In yet another embodiment, a controlled or sustained release system can be placed in proximity of the therapeutic target, i.e., the lungs, thus requiring only a fraction of the systemic dose (see, e.g., Goodson, in Medical Applications of Controlled Release, supra, vol. 2, pp. 115-138(1984)).

[0546] Controlled release systems are discussed in the review by Langer (1990, Science 249:1527-1533). Any technique known to one of skill in the art can be used to produce sustained release formulations comprising one or more antibodies or antigen-binding fragments thereof. See, e.g., U.S. Pat. No. 4,526,938, PCT publication WO 91/05548, PCT publication WO 96/20698, Ning et al., 1996, “Intratumoral Radioimmunotheraphy of a Human Colon Cancer Xenograft Using a Sustained-Release Gel,” Radiotherapy & Oncology 39:179-189, Song et al., 1995, “Antibody Mediated Lung Targeting of Long-Circulating Emulsions,” PDA Journal of Pharmaceutical Science & Technology 50:372-397, Cleek et al., 1997, “Biodegradable Polymeric Carriers for a bFGF Antibody for Cardiovascular Application,” Pro. Int'l. Symp. Control. Rel. Bioact. Mater. 24:853-854, and Lam et al., 1997, “Microencapsulation of Recombinant Humanized Monoclonal Antibody for Local Delivery,” Proc. Int'l. Symp. Control Rel. Bioact. Mater. 24:759-760, each of which is incorporated herein by reference in their entireties.

[0547] In certain embodiments the antibodies are administered repeatedly, wherein the administrations are separated by at least 10 days, 15 days, 30 days, 2 months, 3 months or at least 6 months. In certain embodiments the antibodies are administered repeatedly, wherein the administrations are separated by at most 10 days, 15 days, 30 days, 2 months, 3 months or at most 6 months.

[0548] In certain embodiments, the antibodies are administered during the season of increased risk of pulmonary infections. In specific embodiments, the antibodies are administered during the RSV season.

[0549] 4.4 Pharmaceutical Compositions

[0550] The present invention also provides pharmaceutical compositions. Such compositions comprise one or more of the following: (i) one or more anti-RSV-antigen antibodies or antigen-binding fragments thereof and one or more anti-PIV-antigen antibodies or antigen-binding fragments thereof; (ii) one or more anti-PIV-antigen antibodies or antigen-binding fragments thereof and one or more anti-hMPV-antigen antibodies or antigen-binding fragments thereof; or (iii) one or more anti-RSV-antigen antibodies or antigen-binding fragments thereof, one or more anti-PIV-antigen antibodies or antigen-binding fragments thereof. In certain embodiments, the pharmaceutical composition further comprises a pharmaceutically acceptable carrier. In a specific embodiment, the term “pharmaceutically acceptable” means approved by a regulatory agency of the Federal or a state government or listed in the U.S. Pharmacopeia or other generally recognized pharmacopeia for use in animals, and more particularly in humans. The term “carrier” refers to a diluent, adjuvant (e.g., Freund's adjuvant (complete and incomplete)), excipient, or vehicle with which the therapeutic is administered. Such pharmaceutical carriers can be sterile liquids, such as water and oils, including those of petroleum, animal, vegetable or synthetic origin, such as peanut oil, soybean oil, mineral oil, sesame oil and the like. Water is a preferred carrier when the pharmaceutical composition is administered intravenously. Saline solutions and aqueous dextrose and glycerol solutions can also be employed as liquid carriers, particularly for injectable solutions. Suitable pharmaceutical excipients include starch, glucose, lactose, sucrose, gelatin, malt, rice, flour, chalk, silica gel, sodium stearate, glycerol monostearate, talc, sodium chloride, dried skim milk, glycerol, propylene, glycol, water, ethanol and the like. The composition, if desired, can also contain minor amounts of wetting or emulsifying agents, or pH buffering agents. These compositions can take the form of solutions, suspensions, emulsion, tablets, pills, capsules, powders, sustained-release formulations and the like. Oral formulation can include standard carriers such as pharmaceutical grades of mannitol, lactose, starch, magnesium stearate, sodium saccharine, cellulose, magnesium carbonate, etc. Examples of suitable pharmaceutical carriers are described in “Remington's Pharmaceutical Sciences” by E. W. Martin. Such compositions will contain a prophylactically or therapeutically effective amount of the antibody or fragment thereof, preferably in purified form, together with a suitable amount of carrier so as to provide the form for proper administration to the patient. The formulation should suit the mode of administration.

[0551] In a specific embodiment, the compositions of the invention may be those disclosed in U.S. Provisional Patent Application No. 60/388,920, filed on Jun. 14, 2002 or 60/388,921, filed on Jun. 14, 2002, which are incorporated be reference herein in their entireties.

[0552] In a preferred embodiment, the composition is formulated in accordance with routine procedures as a pharmaceutical composition adapted for intravenous administration to human beings. Typically, compositions for intravenous administration are solutions in sterile isotonic aqueous buffer. Where necessary, the composition may also include a solubilizing agent and a local anesthetic such as lignocamne to ease pain at the site of the injection.

[0553] Generally, the ingredients of compositions of the invention are supplied either separately or mixed together in unit dosage form, for example, as a dry lyophilized powder or water free concentrate in a hermetically sealed container such as an ampoule or sachette indicating the quantity of active agent. Where the composition is to be administered by infusion, it can be dispensed with an infusion bottle containing sterile pharmaceutical grade water or saline. Where the composition is administered by injection, an ampoule of sterile water for injection or saline can be provided so that the ingredients may be mixed prior to administration.

[0554] The compositions of the invention can be formulated as neutral or salt forms.

[0555] Pharmaceutically acceptable salts include those formed with anions such as those derived from hydrochloric, phosphoric, acetic, oxalic, tartaric acids, etc., and those formed with cations such as those derived from sodium, potassium, ammonium, calcium, ferric hydroxides, isopropylamine, triethylamine, 2-ethylamino ethanol, histidine, procaine, etc.

[0556] The amount of the composition of the invention which will be effective in the treatment, prevention or amelioration of one or more symptoms associated with a respiratory viral infection can be determined by standard clinical techniques. For example, the dosage of the composition which will be effective in the treatment, prevention or amelioration of one or more symptoms associated with a respiratory viral infection can be determined by administering the composition to a cotton rat, measuring the RSV, PIV, and/or hMPV titer after challenging the cotton rat with 10⁵ pfu of RSV, PUV, and/or hMPV, respectively, and comparing the RSV, PIV, and/or hMPV titer, respectively, to that obtain for a cotton rat not administered the composition. Accordingly, a dosage that results in a 1 log decrease or a 90% reduction in RSV, PIV, and/or hMPV titer in the cotton rat challenged with 10⁵ pfu of RSV, PIV, and/or hMPV, respectively, relative to the cotton rat challenged with 10⁵ pfu of RSV, PIV, and/or hMPV, respectively, but not administered the composition is the dosage of the composition that can be administered to a human for the treatment, prevention or amelioration of symptoms associated with RSV infection. The dosage of the composition which will be effective in the treatment, prevention or amelioration of one or more symptoms associated with a respiratory, viral infection can be determined by administering the composition to an animal model (e.g., a cotton rat or monkey) and measuring the serum titer of antibodies or antigen-binding fragments thereof that immunospecifically bind to a RSV, PIV, and/or hMPV antigen. Accordingly, a dosage of the composition that results in a serum titer of at least 1 μg/ml, preferably 2 μg/ml, 5 μg/ml, 10 μg/ml, 20 μg/ml, 25 μg/ml, at least 35 μg/ml, at least 40 μg/ml, at least 50 μg/ml, at least 75 μg/ml, at least 100 μg/ml, at least 125 μg/ml, at least 150 μg/ml, at least 200 μg/ml, at least 250 μg/ml, at least 300 μg/ml, at least 350 μg/ml, at least 400 μg/ml, or at least 450 μg/ml for one or all of the antibodies in the composition can be administered to a human for the treatment, prevention or amelioration of one or more symptoms associated with respiratory viral infection. In addition, in vitro assays may optionally be employed to help identify optimal dosage ranges.

[0557] The precise dose to be employed in the formulation will also depend on the route of administration, and the seriousness of the respiratory viral infection, and should be decided according to the judgment of the practitioner and each patient's circumstances. Effective doses may be extrapolated from dose-response curves derived from in vitro or animal model (e.g., the cotton rat or Cynomolgous monkey) test systems.

[0558] For antibodies, the dosage administered to a patient is typically 0.1 mg/kg to 100 mg/kg of each antibody per the patient's body weight. Preferably, the dosage administered to a patient is between 0.1 mg/kg and 20 mg/kg of each antibody per patient's body weight, more preferably 1 mg/kg to 10 mg/kg of each antibody per the patient's body weight. Generally, human antibodies have a longer half-life within the human body than antibodies from other species due to the immune response to the foreign polypeptides. Thus, lower dosages of human antibodies and less frequent administration is often possible. Further, the dosage and frequency of administration of antibodies of the invention or fragments thereof may be reduced by enhancing uptake and tissue penetration (e.g., into the lung) of the antibodies by modifications such as, for example, lipidation.

[0559] In a specific embodiment, antibodies of the invention or fragments thereof, or compositions comprising antibodies of the invention or fragments thereof are administered once a month, once every 6 weeks, or once every 2 months just prior to or during the RSV season. In a specific embodiment, antibodies of the invention or fragments thereof, or compositions comprising antibodies of the invention or fragments thereof are administered once a month, once every 6 weeks, or once every 2 months just prior to or during the PIV season. In a specific embodiment, antibodies of the invention or fragments thereof, or compositions comprising antibodies of the invention or fragments thereof are administered once a month, once every 6 weeks, or once every 2 months just prior to or during the hMPV season. In another embodiment, antibodies or antigen-binding fragments thereof, or compositions comprising antibodies or antigen-binding fragments thereof are administered every two months just prior to or during the RSV, PIV, or hMPV season. In yet another is embodiment, antibodies or antigen-binding fragments thereof, or compositions comprising antibodies or antigen-binding fragments thereof are administered once just prior to or during the RSV, PIV, or hMPV season. The term “RSV season” refers to the season when RSV infection is most likely to occur. Typically, the RSV season in the northern hemisphere commences in November and lasts through April.

[0560] In certain embodiments, the antibodies are administered at least 1 time, 2 times, 3 times, 4 times, 5 times, 6 times, 7 times, 8 times, 9 times, 10 times, 15 times or at least 20 times per RSV season. In certain embodiments, the antibodies are administered at most 1 time, 2 times, 3 times, 4 times, 5 times, 6 times, 7 times, 8 times, 9 times, 10 times, 15 times or at most 20 times per RSV season. In certain embodiments, the antibodies are administered at least 1 time, 2 times, 3 times, 4 times, 5 times, 6 times, 7 times, 8 times, 9 times, 10 times, 15 times or at least 20 times per PIV season. In certain embodiments, the antibodies are administered at most 1 time, 2 times, 3 times, 4 times, 5 times, 6 times, 7 times, 8 times, 9 times, 10 times, 15 times or at most 20 times per PIV season. In certain embodiments, the antibodies are administered at least 1 time, 2 times, 3 times, 4 times, 5 times, 6 times, 7 times, 8 times, 9 times, 10 times, 15 times or at least 20 times per hMPV season. In certain embodiments, the antibodies are administered at most 1 time, 2 times, 3 times, 4 times, 5 times, 6 times, 7 times, 8 times, 9 times, 10 times, 15 times or at most 20 times per hMPV season.

[0561] 4.5 Gene Therapy

[0562] In a specific embodiment, nucleic acids comprising sequences encoding antibodies that immunospecifically bind to an RSV antigen, a PIV antigen, and/or a hMPV antigen or functional derivatives thereof, are administered to treat, prevent or ameliorate one or more symptoms associated with RSV infection, by way of gene therapy. Gene therapy refers to therapy performed by the administration to a subject of an expressed or expressible nucleic acid. In this embodiment of the invention, the nucleic acids produce their encoded antibody or antibody fragment that mediates a prophylactic or therapeutic effect. In a specific embodiment, intrabodies are delivered to a subject via gene therapy (see section 4.1).

[0563] Any of the methods for gene therapy available in the art can be used according to the present invention. Exemplary methods are described below.

[0564] For general reviews of the methods of gene therapy, see Goldspiel et al., 1993, Clinical Pharmacy 12:488-505; Wu and Wu, 1991, Biotherapy 3:87-95; Tolstoshev, 1993, Ann. Rev. Pharmacol. Toxicol. 32:573-596; Mulligan, Science 260:926-932 (1993); and Morgan and Anderson, 1993, Ann. Rev. Biochem. 62:191-217; May, 1993, TIBTECH 11(5):155-215. Methods commonly known in the art of recombinant DNA technology which can be used are described in Ausubel et al. (eds.), Current Protocols in Molecular Biology, John Wiley & Sons, NY (1993); and Kriegler, Gene Transfer and Expression, A Laboratory Manual, Stockton Press, NY (1990).

[0565] In a preferred aspect, a composition of the invention comprises nucleic acids encoding an antibody, said nucleic acids being part of an expression vector that expresses the antibody or fragments or chimeric proteins or heavy or light chains thereof in a suitable host. In particular, such nucleic acids have promoters, preferably heterologous promoters, operably linked to the antibody coding region, said promoter being inducible or constitutive, and, optionally, tissue-specific. In another particular embodiment, nucleic acid molecules are used in which the antibody coding sequences and any other desired sequences are flanked by regions that promote homologous recombination at a desired site in the genome, thus providing for intrachromosomal expression of the antibody encoding nucleic acids (Koller and Smithies, 1989, Proc. Natl. Acad. Sci. USA 86:8932-8935; Zijlstra et al., 1989, Nature 342:435-438). In specific embodiments, the expressed antibody molecule is a single chain antibody; alternatively, the nucleic acid sequences include sequences encoding both the heavy and light chains, or fragments thereof, of the antibody.

[0566] Delivery of the nucleic acids into a subject may be either direct, in which case the subject is directly exposed to the nucleic acid or nucleic acid-carrying vectors, or indirect, in which case, cells are first transformed with the nucleic acids in vitro, then transplanted into the subject. These two approaches are known, respectively, as in vivo or ex vivo gene therapy.

[0567] In a specific embodiment, the nucleic acid sequences are directly administered in vivo, where it is expressed to produce the encoded product. This can be accomplished by any of numerous methods known in the art, e.g., by constructing them as part of an appropriate nucleic acid expression vector and administering it so that they become intracellular, e.g., by infection using defective or attenuated retrovirals or other viral vectors (see U.S. Pat. No. 4,980,286), or by direct injection of naked DNA, or by use of microparticle bombardment (e.g., a gene gun; Biolistic, Dupont), or coating with lipids or cell-surface receptors or transfecting agents, encapsulation in liposomes, microparticles, or microcapsules, or by administering them in linkage to a peptide which is known to enter the nucleus, by administering it in linkage to a ligand subject to receptor-mediated endocytosis (see, e.g., Wu and Wu, 1987, J. Biol. Chem. 262:4429-4432) (which can be used to target cell types specifically expressing the receptors), etc. In another embodiment, nucleic acid-ligand complexes can be formed in which the ligand comprises a fusogenic viral peptide to disrupt endosomes, allowing the nucleic acid to avoid lysosomal degradation. In yet another embodiment, the nucleic acid can be targeted in vivo for cell specific uptake and expression, by targeting a specific receptor (see, e.g., PCT Publications WO 92/06180; WO 92/22635; WO92/203 16; WO93/14188, WO 93/20221). Alternatively, the nucleic acid can be introduced intracellularly and incorporated within host cell DNA for expression, by homologous recombination (Koller and Smithies, 1989, Proc. Natl. Acad. Sci. USA 86:8932-8935; and Zijlstra et al., 1989, Nature 342:435-438).

[0568] In a specific embodiment, viral vectors that contains nucleic acid sequences encoding an antibody of the invention or fragments thereof are used. For example, a retroviral vector can be used (see Miller et al., 1993, Meth. Enzymol. 217:581-599). These retroviral vectors contain the components necessary for the correct packaging of the viral genome and integration into the host cell DNA. The nucleic acid sequences encoding the antibody to be used in gene therapy are cloned into one or more vectors, which facilitates delivery of the gene into a subject. More detail about retroviral vectors can be found in Boesen et al., 1994, Biotherapy 6:291-302, which describes the use of a retroviral vector to deliver the mdr 1 gene to hematopoietic stem cells in order to make the stem cells more resistant to chemotherapy.

[0569] Other references illustrating the use of retroviral vectors in gene therapy are: Clowes et al., 1994, J. Clin. Invest. 93:644-651; Klein et al., 1994, Blood 83:1467-1473; Salmons and Gunzberg, 1993, Human Gene Therapy 4:129-141; and Grossman and Wilson, 1993, Curr. Opin. in Genetics and Devel. 3:110-114.

[0570] Adenoviruses are other viral vectors that can be used in gene therapy. Adenoviruses are especially attractive vehicles for delivering genes to respiratory epithelia. Adenoviruses naturally infect respiratory epithelia where they cause a mild disease. Other targets for adenovirus-based delivery systems are liver, the central nervous system, endothelial cells, and muscle. Adenoviruses have the advantage of being capable of infecting non-dividing cells. Kozarsky and Wilson, 1993, Current Opinion in Genetics and Development 3:499-503 present a review of adenovirus-based gene therapy. Bout et al., 1994, Human Gene Therapy 5:3-10 demonstrated the use of adenovirus vectors to transfer genes to the respiratory epithelia of rhesus monkeys. Other instances of the use of adenoviruses in gene therapy can is be found in Rosenfeld et al., 1991, Science 252:431-434; Rosenfeld et al., 1992, Cell 68:143-155; Mastrangeli et al., 1993, J. Clin. Invest. 91:225-234; PCT Publication WO94/12649; and Wang et al., 1995, Gene Therapy 2:775-783. In a preferred embodiment, adenovirus vectors are used.

[0571] Adeno-associated virus (AAV) has also been proposed for use in gene therapy (Walsh et al., 1993, Proc. Soc. Exp. Biol. Med. 204:289-300; and U.S. Pat. No. 5,436,146).

[0572] Another approach to gene therapy involves transferring a gene to cells in tissue culture by such methods as electroporation, lipofection, calcium phosphate mediated transfection, or viral infection. Usually, the method of transfer includes the transfer of a selectable marker to the cells. The cells are then placed under selection to isolate those cells that have taken up and are expressing the transferred gene. Those cells are then delivered to a subject.

[0573] In this embodiment, the nucleic acid is introduced into a cell prior to administration in vivo of the resulting recombinant cell. Such introduction can be carried out by any method known in the art, including but not limited to transfection, electroporation, microinjection, infection with a viral or bacteriophage vector containing the nucleic acid sequences, cell fusion, chromosome-mediated gene transfer, microcell-mediated gene transfer, spheroplast fusion, etc. Numerous techniques are known in the art for the introduction of foreign genes into cells (see, e.g., Loeffler and Behr, 1993, Meth. Enzymol. 217:599-618; Cohen et al., 1993, Meth. Enzymol. 217:618-644; Clin. Pharma. Ther. 29:69-92 (1985)) and may be used in accordance with the present invention, provided that the necessary developmental and physiological functions of the recipient cells are not disrupted. The technique should provide for the stable transfer of the nucleic acid to the cell, so that the nucleic acid is expressible by the cell and preferably heritable and expressible by its cell progeny.

[0574] The resulting recombinant cells can be delivered to a subject by various methods known in the art. Recombinant blood cells (e.g., hematopoietic stem or progenitor cells) are preferably administered intravenously. The amount of cells envisioned for use depends on the desired effect, patient state, etc., and can be determined by one skilled in the art.

[0575] Cells into which a nucleic acid can be introduced for purposes of gene therapy encompass any desired, available cell type, and include but are not limited to epithelial cells, endothelial cells, keratinocytes, fibroblasts, muscle cells, hepatocytes; blood cells such as T lymphocytes, B lymphocytes, monocytes, macrophages, neutrophils, eosinophils, megakaryocytes, granulocytes; various stem or progenitor cells, in particular hematopoietic stem or progenitor cells, e.g., as obtained from bone marrow, umbilical cord blood, peripheral blood, fetal liver, etc.

[0576] In a preferred embodiment, the cell used for gene therapy is autologous to the subject.

[0577] In an embodiment in which recombinant cells are used in gene therapy, nucleic acid sequences encoding an antibody or fragment thereof are introduced into the cells such that they are expressible by the cells or their progeny, and the recombinant cells are then administered in vivo for therapeutic effect. In a specific embodiment, stem or progenitor cells are used. Any stem and/or progenitor cells which can be isolated and maintained in vitro can potentially be used in accordance with this embodiment of the present invention (see e.g., PCT Publication WO 94/08598; Stemple and Anderson, 1992, Cell 7 1:973-985; Rheinwald, 1980, Meth. Cell Bio. 21A:229; and Pittelkow and Scott, 1986, Mayo Clinic Proc. 61:771).

[0578] In a specific embodiment, the nucleic acid to be introduced for purposes of gene therapy comprises an inducible promoter operably linked to the coding region, such that expression of the nucleic acid is controllable by controlling the presence or absence of the appropriate inducer of transcription.

[0579] 4.6 Antibody Characterization and Demonstration of Therapeutic or Prophylactic Utility

[0580] Antibodies may be characterized in a variety of ways. In particular, antibodies may be assayed for the ability to immunospecifically bind to a RSV antigen, a PIV antigen, and/or a hMPV antigen. Such an assay may be performed in solution (e.g., Houghten, 1992, Bio/Techniques 13:412-421), on beads (Lam, 1991, Nature 354:82-84), on chips (Fodor, 1993, Nature 364:555-556), on bacteria (U.S. Pat. No. 5,223,409), on spores (U.S. Pat. Nos. 5,571,698; 5,403,484; and 5,223,409), on plasmids (Cull et al., 1992, Proc. Natl. Acad. Sci. USA 89:1865-1869) or on phage (Scott and Smith, 1990, Science 249:386-390; Devlin, 1990, Science 249:404-406; Cwirla et al., 1990, Proc. Natl. Acad. Sci. USA 87:6378-6382; and Felici, 1991, J. Mol. Biol. 222:301-310) (each of these references is incorporated herein in its entirety by reference). Antibodies or antigen-binding fragments thereof that have been identified to immunospecifically bind to a RSV antigen, a PIV antigen, and/or a hMPV antigen or a fragment thereof can then be assayed for their avidity and affinity for a RSV antigen, a PIV antigen, and/or a hMPV antigen.

[0581] Immunospecific binding and cross-reactivity with other antigens of an antibody may be determined by any method known in the art. Immunoassays which can be used to analyze immunospecific binding and cross-reactivity include, but are not limited to, competitive and non-competitive assay systems using techniques such as western blots, radioimmunoassays, ELISA (enzyme linked immunosorbent assay), “sandwich” immunoassays, immunoprecipitation assays, precipitin reactions, gel diffusion precipitin reactions, immunodiffusion assays, agglutination assays, complement-fixation assays, immunoradiometric assays, fluorescent immunoassays, protein A immunoassays, to name but a few. Such assays are routine and well known in the art (see, e.g., Ausubel et al, eds, 1994, Current Protocols in Molecular Biology, Vol. 1, John Wiley & Sons, Inc., New York, which is incorporated by reference herein in its entirety). Exemplary immunoassays are described briefly below (but are not intended by way of limitation).

[0582] Immunoprecipitation protocols generally comprise lysing a population of cells in a lysis buffer such as RIPA buffer (1% NP-40 or Triton X-100, 1% sodium deoxycholate, 0.1% SDS, 0.15 M NaCl, 0.01 M sodium phosphate at pH 7.2, 1% Trasylol) supplemented with protein phosphatase and/or protease inhibitors (e.g., EDTA, PMSF, aprotinin, sodium vanadate), adding the antibody of interest to the cell lysate, incubating for a period of time (e.g., 1 to 4 hours) at 40° C., adding protein A and/or protein G sepharose beads to the cell lysate, incubating for about an hour or more at 40° C., washing the beads in lysis buffer and resuspending the beads in SDS/sample buffer. The ability of the antibody of interest to immunoprecipitate a particular antigen can be assessed by, e.g., western blot analysis. One of skill in the art would be knowledgeable as to the parameters that can be modified to increase the binding of the antibody to an antigen and decrease the background (e.g. pre-clearing the cell lysate with sepharose beads). For further discussion regarding immunoprecipitation protocols see, e.g., Ausubel et al, eds, 1994, Current Protocols in Molecular Biology, Vol. 1, John Wiley & Sons, Inc., New York at 10.16.1.

[0583] Western blot analysis generally comprises preparing protein samples, electrophoresis of the protein samples in a polyacrylamide gel (e.g., 8%-20% SDS-PAGE depending on the molecular weight of the antigen), transferring the protein sample from the polyacrylamide gel to a membrane such as nitrocellulose, PVDF or nylon, blocking the membrane in blocking solution (e.g., PBS with 3% BSA or non-fat milk), washing the membrane in washing buffer (e.g., PBS-Tween 20), blocking the membrane with primary antibody (the antibody of interest) diluted in blocking buffer, washing the membrane in washing buffer, blocking the membrane with a secondary antibody (which recognizes the primary antibody, e.g., an anti-human antibody) conjugated to an enzymatic substrate (e.g., horseradish peroxidase or alkaline phosphatase) or radioactive molecule (e.g., ³²P or ¹²⁵I) diluted in blocking buffer, washing the membrane in wash buffer, and detecting the presence of the antigen. One of skill in the art would be knowledgeable as to the parameters that can be modified to increase the signal detected and to reduce the background noise. For further discussion regarding western blot protocols see, e.g., Ausubel et al, eds, 1994, Current Protocols in Molecular Biology, Vol. 1, John Wiley & Sons, Inc., New York at 10.8.1.

[0584] ELISAs comprise preparing antigen, coating the well of a 96 well microtiter plate with the antigen, adding the antibody of interest conjugated to a detectable compound such as an enzymatic substrate (e.g., horseradish peroxidase or alkaline phosphatase) to the well and incubating for a period of time, and detecting the presence of the antigen. In ELISAs the antibody of interest does not have to be conjugated to a detectable compound; instead, a second antibody (which recognizes the antibody of interest) conjugated to a detectable compound may be added to the well. Further, instead of coating the well with the antigen, the antibody may be coated to the well. In this case, a second antibody conjugated to a detectable compound may be added following the addition of the antigen of interest to the coated well. One of skill in the art would be knowledgeable as to the parameters that can be modified to increase the signal detected as well as other variations of ELISAs known in the art. For further discussion regarding ELISAs see, e.g., Ausubel et al, eds, 1994, Current Protocols in Molecular Biology, Vol. 1, John Wiley & Sons, Inc., New York at 11.2.1.

[0585] The binding affinity of an antibody to an antigen and the off-rate of an antibody-antigen interaction can be determined by competitive binding assays. One example of a competitive binding assay is a radioimmunoassay comprising the incubation of labeled antigen (e.g., ³H or 1251 with the antibody of interest in the presence of increasing amounts of unlabeled antigen, and the detection of the antibody bound to the labeled antigen. The affinity of the antibody of the present invention or a fragment thereof for a RSV antigen and the binding off-rates can be determined from the data by scatchard plot analysis. Competition with a second antibody can also be determined using radioimmunoassays. In a specific embodiment, a first antibody or an antigen-binding fragment thereof is conjugated to a labeled compound (e.g., ³H or ¹²⁵I) in the presence of increasing amounts of an unlabeled second antibody.

[0586] In a preferred embodiment, BIAcore kinetic analysis is used to determine the binding on and off rates of antibodies or antigen-binding fragments thereof to a RSV, PUV and/or hMPV antigen. BIAcore kinetic analysis comprises analyzing the binding and dissociation of a RSV antigen from chips with immobilized antibodies or antigen-binding fragments thereof on their surface (see the Example section infra).

[0587] The antibodies of the invention or fragments thereof can also be assayed for their ability to inhibit the binding of RSV, PIV and/or hMPV to its host cell receptor using techniques known to those of skill in the art. For example, cells expressing the receptor for RSV, PIV and/or hMPV, respectively, can be contacted with RSV, PIV and/or hMPV, respectively, in the presence or absence of an antibody or fragment thereof and the ability of the antibody or fragment thereof to inhibit RSV, PIV and/or hMPV's binding can measured by, for example, flow cytometry or a scintillation assay. RSV, PIV and/or hMPV (e.g., a RSV, PIV and/or hMPV antigen such as F glycoprotein or G glycoprotein) or the antibody or antibody fragment can be labeled with a detectable compound such as a radioactive label (e.g., ³²P, ³⁵S, and ¹²⁵I) or a fluorescent label (e.g., fluorescein isothiocyanate, rhodamine, phycoerythrin, phycocyanin, allophycocyanin, α-phthaldehyde and fluorescamine) to enable detection of an interaction between RSV, PIV and/or hMPV and its respective host cell receptor. Alternatively, the ability of antibodies or antigen-binding fragments thereof to inhibit RSV, PIV and/or hMPV from binding to its receptor can be determined in cell-free assays. For example, RSV, PIV and/or hMPV or a RSV, PIV and/or hMPV antigen such as G glycoprotein can be contacted with an antibody or fragment thereof and the ability of the antibody or antibody fragment to inhibit RSV, PIV and/or hMPV or the RSV, PIV and/or hMPV antigen from binding to its host cell receptor can be determined. Preferably, the antibody or the antibody fragment is immobilized on a solid support and RSV, PIV and/or hMPV, or a RSV, PIV and/or hMPV antigen is labeled with a detectable compound. Alternatively, RSV, PIV and/or hMPV, or a RSV, PIV and/or hMPV antigen is immobilized on a solid support and the antibody or fragment thereof is labeled with a detectable compound. RSV, PIV and/or hMPV, or a RSV, PIV and/or hMPV antigen may be partially or completely purified (e.g., partially or completely free of other polypeptides) or part of a cell lysate. Further, a RSV, PIV and/or hMPV antigen may be a fusion protein comprising the RSV, PIV and/or hMPV antigen and a domain such as glutathionine-S-transferase. Alternatively, a RSV, PIV and/or hMPV antigen can be biotinylated using techniques well known to those of skill in the art (e.g., biotinylation kit, Pierce Chemicals; Rockford, Ill.).

[0588] The antibodies of the invention or fragments thereof can also be assayed for their ability to inhibit or downregulate RSV, PIV and/or hMPV replication using techniques known to those of skill in the art. For example, RSV, PIV and/or hMPV replication can be assayed by a plaque assay such as described, e.g., by Johnson et al., 1997, Journal of Infectious Diseases 176:1215-1224. The antibodies of the invention or fragments thereof can also be assayed for their ability to inhibit or downregulate the expression of RSV, PIV and/or hMPV polypeptides. Techniques known to those of skill in the art, including, but not limited to, Western blot analysis, Northern blot analysis, and RT-PCR can be used to measure the expression of RSV, PIV and/or hMPV polypeptides. Further, the antibodies of the invention or fragments thereof can be assayed for their ability to prevent the formation of syncytia.

[0589] The antibodies of the invention or fragments thereof are preferably tested in vitro, and then in vivo for the desired therapeutic or prophylactic activity, prior to use in humans. For example, in vitro assays which can be used to determine whether administration of a specific antibody or composition of the present invention is indicated, include in vitro cell culture assays in which a subject tissue sample is grown in culture, and exposed to or otherwise administered an antibody or composition of the present invention, and the effect of such an antibody or composition of the present invention upon the tissue sample is observed. In various specific embodiments, in vitro assays can be carried out with representative cells of cell types involved in a RSV, PIV and/or hMPV infection (e.g., respiratory epithelial cells), to determine if an antibody or composition of the present invention has a desired effect upon such cell types. Preferably, the antibodies or compositions comprising the antibodies are also tested in in vitro assays and animal model systems prior to administration to humans. In a specific embodiment, cotton rats are administered an antibody or fragment thereof, or a composition of the invention, challenged with 10⁵ pfu of RSV, PIV and/or hMPV, and four or more days later the rats are sacrificed and RSV, PIV and/or hMPV titer and anti-RSV, anti-PIV and/or anti-hMPV antibody serum level is determined. Further, in accordance with this embodiment, the tissues (e.g., the lung tissues) from the sacrificed rats can be examined for histological changes.

[0590] In accordance with the invention, clinical trials with human subjects need not be performed in order to demonstrate the prophylactic and/or therapeutic efficacy of antibodies of the invention or fragments thereof. In vitro and animal model studies using the antibodies or antigen-binding fragments thereof can be extrapolated to humans and are sufficient for demonstrating the prophylactic and/or therapeutic utility of said antibodies or antibody fragments.

[0591] Antibodies or compositions that can be used with the methods of the present invention can be tested for their toxicity in suitable animal model systems, including but not limited to rats, mice, cows, monkeys, and rabbits. For in vivo testing of an antibody or composition's toxicity any animal model system known in the art may be used.

[0592] The treatment is considered therapeutic if there is, for example, a reduction is viral load, amelioration of one or more symptoms, a reduction in the duration of a respiratory viral infection, or a decrease in mortality and/or morbidity following administration of an antibody or composition of the invention. Further, the treatment is considered therapeutic if there is an increase in the immune response following the administration of one or more antibodies or antigen-binding fragments thereof which immunospecifically bind to one or more RSV, PIV, and/or hMPV antigens.

[0593] Antibodies can be tested in vitro and in vivo for the ability to affect the expression levels of cytokines such as, but not limited to, IFN-α, IFN-β, IFN-γ, IL-2, IL-3, IL-4, IL-5, IL-6, IL-7, IL-8, IL-9, IL-10, IL-12 and IL-15. In a more specific embodiment, an antibody or composition of the invention is tested for its ability to affect the expression level of one or more cytokines, the expression of which have been induced by a respiratory viral infection. In an even more specific embodiment, an antibody or composition of the invention is tested for its ability to reduce the expression level of one or more virus-induced cytokines. Techniques known to those of skill in the art can be used to measure the level of expression of cytokines. For example, the level of expression of cytokines can be measured by analyzing the level of RNA of cytokines by, for example, RT-PCR and Northern blot analysis, and by analyzing the level of cytokines by, for example, immunoprecipitation followed by western blot analysis and ELISA. In a preferred embodiment, an antibody or composition of the invention is tested for its ability to affect the expression of IFN-γ. In a more specific embodiment, an antibody or composition of the invention is tested for its ability to affect the expression level of IFN-γ the expression of which has been induced by a respiratory viral infection. In an even more specific embodiment, an antibody or composition of the invention is tested for its ability to reduce the expression level of virus-induced IFN-γ.

[0594] Antibodies can be tested in vitro and in vivo for their ability to modulate the biological activity of immune cells, preferably human immune cells (e.g., but not limited to, T-cells, B-cells, and Natural Killer cells). In more specific embodiments, antibodies can be tested in vitro and in vivo for their ability to modulate the biological activity of immune cells that has been induced by a respiratory viral infection. In even more specific embodiments, antibodies can be tested for their ability to reduce the one or more biological activities of immune cells that have been induced by a respiratory viral infection. The ability of antibodies or antigen-binding fragments thereof to modulate the biological activity of immune cells can be assessed by detecting the expression of antigens, detecting the proliferation of immune cells, detecting the activation of signaling molecules, detecting the effector function of immune cells, or detecting the differentiation of immune cells. Techniques known to those of skill in the art can be used for measuring these activities. For example, cellular proliferation can be assayed by 3H-thymidine incorporation assays and trypan blue cell counts. Antigen expression can be assayed, for example, by immunoassays including, but are not limited to, competitive and non-competitive assay systems using techniques such as western blots, immunohistochemistry radioimmunoassays, ELISA (enzyme linked immunosorbent assay), “sandwich” immunoassays, immunoprecipitation assays, precipitin reactions, gel diffusion precipitin reactions, immunodiffusion assays, agglutination assays, complement-fixation assays, immunoradiometric assays, fluorescent immunoassays, protein A immunoassays and FACS analysis. The activation of signaling molecules can be assayed, for example, by kinase assays and electrophoretic shift assays (EMSAs).

[0595] Antibodies can also be tested for their ability to inhibit viral replication or reduce viral load in in vitro, ex vivo and in vivo assays. Antibodies can also be tested for their ability to decrease the time course of a respiratory viral infection. Antibodies can also be tested for their ability to increase the survival period of humans suffering from RSV infection by at least 25%, preferably at least 50%, at least 60%, at least 75%, at least 85%, at least 95%, or at least 99%. Further, antibodies can be tested for their ability reduce the hospitalization period of humans suffering from respiratory viral infection by at least 60%, preferably at least 75%, at least 85%, at least 95%, or at least 99%. Techniques known to those of skill in the art can be used to analyze the function of the antibodies or compositions of the invention in vivo.

[0596] 4.7 Kits

[0597] The invention also provides a pharmaceutical pack or kit comprising one or more containers filled with one or more of the ingredients of the pharmaceutical compositions of the invention. Optionally associated with such container(s) can be a notice in the form prescribed by a governmental agency regulating the manufacture, use or sale of pharmaceuticals or biological products, which notice reflects approval by the agency of manufacture, use or sale for human administration.

[0598] The present invention provides kits that can be used in the above methods. In one embodiment, a kit comprises (i) one or more anti-RSV-antigen antibodies or antigen-binding fragments thereof and one or more anti-PIV-antigen antibodies or antigen-binding fragments thereof; (ii) one or more anti-PIV-antigen antibodies or antigen-binding fragments thereof and one or more anti-hMPV-antigen antibodies or antigen-binding fragments thereof; or (iii) one or more anti-RSV-antigen antibodies or antigen-binding fragments thereof, one or more anti-hMPV-antigen antibodies or antigen-binding fragments thereof. In certain embodiments, a kit comprises one or more anti-PIV-antigen antibodies, one or more anti-hMPV-antigen antibodies, and one or more anti-RSV-antigen antibodies.

[0599] In certain embodiments, the kits of the present invention further comprise a control antibody which does not react with a RSV antigen, a PIV antigen, and a hMPV antigen. In another specific embodiments, the kits of the present invention contain a means for detecting the binding of an antibody to a RSV antigen, a PIV antigen, and/or a hMPV antigen (e.g., the antibody may be conjugated to a detectable substrate such as a fluorescent compound, an enzymatic substrate, a radioactive compound or a luminescent compound, or a second antibody which recognizes the first antibody may be conjugated to a detectable substrate). In specific embodiments, the kit may include a recombinantly produced or chemically synthesized RSV antigen, a PIV antigen, and/or a hMPV antigen. The RSV antigen, a PIV antigen, and/or a hMPV antigen provided in the kit may also be attached to a solid support. In a more specific embodiment the detecting means of the above-described kit includes a solid support to which RSV antigen, a PIV antigen, and/or a hMPV antigen is attached. Such a kit may also include a non-attached reporter-labeled anti-human antibody. In this embodiment, binding of the antibody to the RSV antigen, a PIV antigen, and/or a hMPV antigen can be detected by binding of the said reporter-labeled antibody.

[0600] 4.8. Assays for Use with the Invention

[0601] 4.8.1 Measurement of Incidence of Infection Rate

[0602] The incidence of infection can be determined by any method well-known in the art, for example, but not limited to, clinical samples (e.g., nasal swabs) can be tested for the presence of RSV, PIV, and/or hMPV by immunofluorescence assay (IFA) using an anti-RSV-antigen antibody, an anti-PIV-antigen antibody, and/or an anti-hMPV-antigen antibody, respectively. Samples containing intact cells can be directly processed, whereas isolates without intact cells should first be cultured on a permissive cell line (e.g. HEp-2 cells). Cultured cell suspensions should be cleared by centrifugation at, e.g., 300×g for 5 minutes at room temperature, followed by a PBS, pH 7.4 (Ca++ and Mg++ free) wash under the same conditions. Cell pellets are resuspended in a small volume of PBS for analysis. Primary clinical isolates containing intact cells are mixed with PBS and centrifuged at 300×g for 5 minutes at room temperature. Mucus is removed from the interface with a sterile pipette tip and cell pellets are washed once more with PBS under the same conditions. Pellets are then resuspended in a small volume of PBS for analysis. Five to ten microliters of each cell suspension are spotted per 5 mm well on acetone washed 12-well HTC supercured glass slides and allowed to air dry. Slides are fixed in cold (−20° C.) acetone for 10 minutes. Reactions are blocked by adding PBS −1% BSA to each well followed by a 10 minute incubation at room temperature. Slides are washed three times in PBS −0.1% Tween-20 and air dried. Ten microliters of each primary antibody reagent diluted to 250 ng/ml in blocking buffer is spotted per well and reactions are incubated in a humidified 37° C. environment for 30 minutes. Slides are then washed extensively in three changes of PBS −0.1% Tween-20 and air dried. Ten microliters of appropriate secondary conjugated antibody reagent diluted to 250 ng/ml in blocking buffer are spotted per respective well and reactions are incubated in a humidified 37° C. environment for an additional 30 minutes. Slides are then washed in three changes of PBS −0.1% Tween-20. Five microliters of PBS-50% glycerol-10 mM Tris pH 8.0-1 mM EDTA are spotted per reaction well, and slides are mounted with cover slips. Each reaction well is subsequently analyzed by fluorescence microscopy at 200× power using a B2A filter (EX 450-490 nm). Positive reactions are scored against an autofluorescent background obtained from unstained cells or cells stained with secondary reagent alone. RSV positive reactions are characterized by bright fluorescence punctuated with small inclusions in the cytoplasm of infected cells.

[0603] 4.8.2 Measurement of Serum Titer

[0604] The antibody serum titer can be determined by any method well-known in the art, for example, but not limited to, the amount of antibody or antibody fragment in serum samples can be quantitated by a sandwich ELISA. Briefly, the ELISA consists of coating microtiter plates overnight at 4° C. with an antibody that recognizes the antibody or antibody fragment in the serum. The plates are then blocked for approximately 30 minutes at room temperature with PBS-Tween-0.5% BSA. Standard curves are constructed using purified antibody or antibody fragment diluted in PBS-TWEEN-BSA, and samples are diluted in PBS-BSA-BSA. The samples and standards are added to duplicate wells of the assay plate and are incubated for approximately 1 hour at room temperature. Next, the non-bound antibody is washed away with PBS-TWEEN and the bound antibody is treated with a labeled secondary antibody (e.g., horseradish peroxidase conjugated goat-anti-human IgG) for approximately 1 hour at room temperature. Binding of the labeled antibody is detected by adding a chromogenic substrate specific for the label and measuring the rate of substrate turnover, e.g., by a spectrophotometer. The concentration of antibody or antibody fragment levels in the serum is determined by comparison of the rate of substrate turnover for the samples to the rate of substrate turnover for the standard curve.

[0605] 4.8.3 BIAcore Assay

[0606] Determination of the kinetic parameters of antibody binding can be determined for example by the injection of 250 μL of monoclonal antibody (“mAb”) at varying concentration in HBS buffer containing 0.05% Tween-20 over a sensor chip surface, onto which has been immobilized the antigen. The flow rate is maintained constant at 75 uL/min. Dissociation data is collected for 15 min, or longer as necessary. Following each injection/dissociation cycle, the bound mAb is removed from the antigen surface using brief, 1 min pulses of dilute acid, typically 10-100 mM HCl, though other regenerants are employed as the circumstances warrant.

[0607] More specifically, for measurement of the rates of association, kₒₙ, and dissociation, k_{off}, the antigen is directly immobilized onto the sensor chip surface through the use of standard amine coupling chemistries, namely the EDC/NHS method (EDC=N-diethylaminopropyl)-carbodiimide). Briefly, a 5-100 nM solution of the antigen in 10 mM NaOAc, pH4 or pH5 is prepared and passed over the EDC/NHS-activated surface until approximately 30-50 RU's worth of antigen are immobilized. Following this, the unreacted active esters are “capped” off with an injection of 1M Et-NH2. A blank surface, containing no antigen, is prepared under identical immobilization conditions for reference purposes. Once a suitable surface has been prepared, an appropriate dilution series of each one of the antibody reagents is prepared in HBS/Tween-20, and passed over both the antigen and reference cell surfaces, which are connected in series. The range of antibody concentrations that are prepared varies depending on what the equilibrium binding constant, K_{D}, is estimated to be. As described above, the bound antibody is removed after each injection/dissociation cycle using an appropriate regenerant.

[0608] Once an entire data set is collected, the resulting binding curves are globally fitted using algorithms supplied by the instrument manufacturer, BIAcore, Inc. (Piscataway, N.J.). All data are fitted to a 1:1 Langmuir binding model. These algorithm calculate both the kₒₙ and the k_{off}, from which the apparent equilibrium binding constant, K_{D}, is deduced as the ratio of the two rate constants (i.e. k_{off}/kₒₙ). More detailed treatments of how the individual rate constants are derived can be found in the BIAevaluation Software Handbook (BIAcore, Inc., Piscataway, N.J.).

[0609] 4.8.4 Microneutralization Assay

[0610] The ability of antibodies or antigen-binding fragments thereof to neutralize virus infectivity is determined by a microneutralization assay. This microneutralization assay is a modification of the procedures described by Anderson et al. (1985, J. Clin. Microbiol. 22:1050-1052, the disclosure of which is hereby incorporated by reference in its entirety). The procedure is also described in Johnson et al., 1999, J. Infectious Diseases 180:35-40, the disclosure of which is hereby incorporated by reference in its entirety.

[0611] Antibody dilutions are made in triplicate using a 96-well plate. Ten TCID₅₀ of RSV, PIV, APV, and/or hMPV are incubated with serial dilutions of the antibody or antigen-binding fragments thereof to be tested for 2 hours at 37_C in the wells of a 96-well plate.

[0612] RSV susceptible cultured liver cells, such as, but not limited to HEp-2 cells (2.5×10⁴) are then added to each well and cultured for 5 days at 37_C. in 5% CO₂. After 5 days, the medium is aspirated and cells are washed and fixed to the plates with 80% methanol and 20% PBS. Virus replication is then determined by viral antigen, such as F protein expression. Fixed cells are incubated with a biotin-conjugated anti-viral antigen, such as anti-F protein monoclonal antibody (e.g., pan F protein, C-site-specific MAb 133-1H) washed and horseradish peroxidase conjugated avidin is added to the wells. The wells are washed again and turnover of substrate TMB (thionitrobenzoic acid) is measured at 450 nm. The neutralizing titer is expressed as the antibody concentration that causes at least 50% reduction in absorbency at 450 nm (the OD₄₅₀) from virus-only control cells.

[0613] 4.8.5 Viral Fusion Inhibition Assay

[0614] The ability of anti-RSV-antigen antibodies, anti-PIV-antigen antibodies, and/or anti-hMPV-antigen antibodies or antigen-binding fragments thereof to block RSV, PIV, and hMPV, respectively, induced fusion after viral attachment to the cells is determined in a fusion inhibition assay. This assay is identical to the microneutralization assay, except that the cells are infected with the respective virus for four hours prior to addition of antibody (Taylor et al, 1992, J. Gen. Virol. 73:2217-2223).

[0615] 4.8.6 Isothermal Titration Calorimetry

[0616] Thermodynamic binding affinities and enthalpies are determined from isothermal titration calorimetry (ITC) measurements on the interaction of antibodies with their respective antigen.

[0617] Antibodies are diluted in dialysate and the concentrations were determined by UV spectroscopic absorption measurements with a Perkin-Elmer Lambda 4B Spectrophotometer using an extinction coefficient of 217,000 M⁻¹ cm⁻¹ at the peak maximum at 280 nm. The diluted RSV-antigen, PIV-antigen, and/or hMPV-antigen concentrations are calculated from the ratio of the mass of the original sample to that of the diluted sample since its extinction coefficient is too low to determine an accurate concentration without employing and losing a large amount of sample.

[0618] ITC Measurements

[0619] The binding thermodynamics of the antibodies are determined from ITC measurements using a Microcal, Inc. VP Titration Calorimeter. The VP titration calorimeter consists of a matched pair of sample and reference vessels (1.409 ml) enclosed in an adiabatic enclosure and a rotating stirrer-syringe for titrating ligand solutions into the sample vessel. The ITC measurements are performed at 25° C. and 35° C. The sample vessel contained the antibody in the phosphate buffer while the reference vessel contains just the buffer solution. The phosphate buffer solution is saline 67 mM PO₄ at pH 7.4 from HyClone, Inc. Five or ten μl aliquots of the 0.05 to 0.1 mM RSV-antigen, PIV-antigen, and/or hMPV-antigen solution are titrated 3 to 4 minutes apart into the antibody sample solution until the binding is saturated as evident by the lack of a heat exchange signal.

[0620] A non-linear, least square minimization software program from Microcal, Inc., Origin 5.0, is used to fit the incremental heat of the ith titration (ΔQ (i)) of the total heat, Qₜ, to the total titrant concentration, Xₜ, according to the following equations (I),

Qₜ=nCₜΔH_{b°}V{1+Xₜ/nCₜ+1/nK_{b}Cₜ−[(1+Xₜ/nCₜ+1/nK_{b}Cₜ)²−4Xₜ/nCₜ]^{1/2}}/2 (1a)

ΔQ(i)=Q(i)+dVi/2V {Q(i)+Q(i−1)}−Q(i−1) (1b)

[0621] where Cₜ is the initial antibody concentration in the sample vessel, V is the volume of the sample vessel, and n is the stoichiometry of the binding reaction, to yield values of K_{b}, ΔH_{b}°, and n. The optimum range of sample concentrations for the determination of K_{b} depends on the value of K_{b} and is defined by the following relationship.

CₜK_{b}n≦100 (2)

[0622] so that at 1 μM the maximum K_{b} that can be determined is less than 2.5×10⁸ M⁻¹. If the first titrant addition does not fit the binding isotherm, it was neglected in the final analysis since it may reflect release of an air bubble at the syringe opening-solution interface.

[0623] 4.8.7 Cotton Rat Prophylaxis

[0624] This assay is used to determine the ability of anti-RSV-antigen antibodies, anti-PIV-antigen antibodies, and/or anti-hMPV-antigen antibodies or fragments thereof to prevent lower respiratory tract viral infection in cotton rats when administered by intravenous (IV) route. In certain other embodiments, the antibodies are administered by intramuscular (IM) route or by intranasal route (IN). The antibodies can be administered by any technique well-known to the skilled artisan. This assay is also used to correlate the serum concentration of anti-RSV-antigen antibodies, anti-PIV-antigen antibodies, and/or anti-hMPV-antigen antibodies with a reduction in lung RSV, PIV, and/or hMPV, respectively, titer.

[0625] Bovine serum albumin (BSA; fraction V) can be obtained from Sigma Chemicals. RSV-Long (A subtype), RSV B subtype, PIV, or hMPV is propagated in cultured liver cells, such as, but not limited to Hep-2 cells. On day 0, groups of cotton rats (Sigmodon hispidis, average weight 100 g) are administered the antibody of interest or BSA by intramuscular injection, by intravenous injection, or by intranasal route. Four days after the infection, animals are sacrificed, and their lung tissue is harvested and pulmonary virus titers are determined by plaque titration. In certain embodiments, 0.31, 0.63, 1.25, 2.5, 5.5 and 10 mg/kg (body weight) of antibody are administered. Bovine serum albumin (BSA) 10 mg/kg is used as a negative control. Antibody concentrations in the serum at the time of challenge are determined using a sandwich ELISA.

[0626] 4.8.8 Bioavailability

[0627] The percent of dose entering the systemic circulation after administration of a given dosage of antibodies (drug) is referred to as bioavailability. More explicitly, bioavailability is defined as the ratio of the amount of antibodies “absorbed” from a test formulation to the amount “absorbed” after administration of a standard formulation. Frequently, the “standard formulation” used in assessing bioavailability is the aqueous solution of the drug, given intravenously.

[0628] The amount of antibodies absorbed is taken as a measure of the ability of the formulation to deliver the antibodies to the sites of drug action; this will depend on such factors as, e.g., disintegration and dissolution properties of the dosage form, and the rate of biotransformation relative to rate of absorption—dosage forms containing identical amounts of active drug may differ markedly in their abilities to make drug available, and therefore, in their abilities to permit the drug to manifest its expected pharmacodynamic and therapeutic properties.

[0629] “Amount absorbed” is conventionally measured by one of two criteria, either the area under the time-plasma concentration curve (A UC) or the total (cumulative) amount of drug excreted in the urine following drug administration. A linear relationship exists between “area under the curve” and dose when the fraction of drug absorbed is independent of dose, and elimination rate (half-life) and volume of distribution are independent of dose and dosage form. A linearity of the relationship between area under the curve and dose may occur if, for example, the absorption process is a saturable one, or if drug fails to reach the systemic circulation because of, e.g., binding of drug in the intestine or biotransformation in the liver during the drug's first transit through the portal system.

[0630] 4.8.9 Clinical Trials

[0631] Antibodies of the invention or fragments thereof tested in in vitro assays and animal models may be further evaluated for safety, tolerance and pharmacokinetics in groups of normal healthy adult volunteers. The volunteers are administered intramuscularly, intravenously or by a pulmonary delivery system a single dose of 0.5 mg/kg, 3 mg/kg, 5 mg/kg, 10 mg/kg or 15 mg/kg of an antibody or fragment thereof which immunospecifically binds to a RSV, PIV, and/or hMPV antigen. Each volunteer is monitored at least 24 hours prior to receiving the single dose of the antibody or fragment thereof and each volunteer will be monitored for at least 48 hours after receiving the dose at a clinical site. Then volunteers are monitored as outpatients on days 3, 7, 14, 21, 28, 35, 42, 49, and 56 postdose.

[0632] Blood samples are collected via an indwelling catheter or direct venipuncture using 10 ml red-top Vacutainer tubes at the following intervals: (1) prior to administering the dose of the antibody or antibody fragment; (2) during the administration of the dose of the antibody or antibody fragment; (3) 5 minutes, 10 minutes, 15 minutes, 20 minutes, 30 minutes, 1 hour, 2 hours, 4 hours, 8 hours, 12 hours, 24 hours, and 48 hours after administering the dose of the is antibody or antibody fragment; and (4) 3 days, 7 days 14 days, 21 days, 28 days, 35 days, 42 days, 49 days, and 56 days after administering the dose of the antibody or antibody fragment.

[0633] Samples are allowed to clot at room temperature and serum will be collected after centrifugation.

[0634] The antibody or antibody fragment is partially purified from the serum samples and the amount of antibody or antibody fragment in the samples will be quantitated by ELISA. Briefly, the ELISA consists of coating microtiter plates overnight at 4° C. with an antibody that recognizes the antibody or antibody fragment administered to the volunteer. The plates are then blocked for approximately 30 minutes at room temperate with PBS-Tween-0.5% BSA. Standard curves are constructed using purified antibody or antibody fragment, not administered to a volunteer. Samples are diluted in PBS-Tween-BSA. The samples and standards are incubated for approximately 1 hour at room temperature. Next, the bound antibody is treated with a labeled antibody (e.g., horseradish peroxidase conjugated goat-anti-human IgG) for approximately 1 hour at room temperature. Binding of the labeled antibody is detected, e.g., by a spectrophotometer.

[0635] The concentration of antibody or antibody fragment levels in the serum of volunteers are corrected by subtracting the predose serum level (background level) from the serum levels at each collection interval after administration of the dose. For each volunteer the pharmacokinetic parameters are computed according to the model-independent approach (Gibaldi et al., eds., 1982, Pharmacokinetics, 2^{nd} edition, Marcel Dekker, New York) from the corrected serum antibody or antibody fragment concentrations.

[0636] 4.8.10 Methods to Identify MPV

[0637] The invention encompasses treatment of any isolates of MPV, including those which are characterized as belonging to the subgroups and variants described in section 4.1.7.1, or belonging to a yet to be characterized subgroup or variant.

[0638] Immunoassays can be used in order to characterize the protein components that are present in a given sample. Immunoassays are an effective way to compare viral isolates using peptides components of the viruses for identification. For example, a method for identifying an isolates of MPV comprises inoculating an essentially MPV-uninfected or specific-pathogen-free guinea pig or ferret (in the detailed description the animal is inoculated intranasally but other was of inoculation such as intramuscular or intradermal inoculation, and using an other experimental animal, is also feasible) with the prototype isolate I-2614 or related isolates. Sera are collected from the animal at day zero, two weeks and three weeks post inoculation. The animal specifically seroconverted as measured in virus neutralization (VN) assay and indirect immunofluorescence assay against the respective isolate I-2614 and the sera from the seroconverted animal are used in the immunological detection of said further isolates. As an example, the invention provides the characterization of a new member in the family of Paramyxoviridae, a human metapneumovirus or metapneumovirus-like virus (since its final taxonomy awaits discussion by a viral taxonomy committee the MPV is herein for example described as taxonomically corresponding to APV) (MPV) which may cause severe respiratory tract infection in humans. The clinical signs of the disease caused by MPV are essentially similar to those caused by hRSV, such as cough, myalgia, vomiting, fever broncheolitis or pneumonia, possible conjunctivitis, or combinations thereof. As is seen with hRSV infected children, specifically very young children may require hospitalization. As an example an MPV which was deposited Jan. 19, 2001 as I-2614 with CNCM, Institute Pasteur, Paris or a virus isolate phylogenetically corresponding therewith can be used

[0639] 4.8.10.1 Phylogenetic Analysis

[0640] Phylogenetic relationships between isolates of mammalian MPV can be evaluated by the methods set forth below or any other technique known to the skilled artisan. Many methods or approaches are available to analyze phylogenetic relationship; these include distance, maximum likelihood, and maximum parsimony methods (Swofford, D L., et. al., Phylogenetic Inference. In Molecular Systematics. Eds. Hillis, D M, Mortiz, C, and Mable, B K. 1996. Sinauer Associates: Massachusetts, USA. pp. 407-514; Felsenstein, J., 1981, J. Mol. Evol. 17:368-376). In addition, bootstrapping techniques are an effective means of preparing and examining confidence intervals of resultant phylogenetic trees (Felsenstein, J., 1985, Evolution. 29:783-791). Any method or approach using nucleotide or peptide sequence information to compare mammalian MPV isolates can be used to establish phylogenetic relationships, including, but not limited to, distance, maximum likelihood, and maximum parsimony methods or approaches. Any method known in the art can be used to analyze the quality of phylogenetic data, including but not limited to bootstrapping. Alignment of nucleotide or peptide sequence data for use in phylogenetic approaches, include but are not limited to, manual alignment, computer pairwise alignment, and computer multiple alignment. One skilled in the art would be familiar with the preferable alignment method or phylogenetic approach to be used based upon the information required and the time allowed.

[0641] In one embodiment, a DNA maximum likehood method is used to infer relationships between hMPV isolates. In another embodiment, bootstrapping techniques are used to determine the certainty of phylogenetic data created using one of said phylogenetic approaches. In another embodiment, jumbling techniques are applied to the phylogenetic approach before the input of data in order to minimize the effect of sequence order entry on the phylogenetic analyses. In one specific embodiment, a DNA maximum likelihood method is used with bootstrapping. In another specific embodiment, a DNA maximum likelihood method is used with bootstrapping and jumbling. In another more specific embodiment, a DNA maximum likelihood method is used with 50 bootstraps. In another specific embodiment, a DNA maximum likelihood method is used with 50 bootstraps and 3 jumbles. In another specific embodiment, a DNA maximum likelihood method is used with 100 bootstraps and 3 jumbles.

[0642] In one embodiment, nucleic acid or peptide sequence information from an isolate of hMPV is compared or aligned with sequences of other hMPV isolates. The amino acid sequence can be the amino acid sequence of the L protein, the M protein, the N protein, the P protein, or the F protein. In another embodiment, nucleic acid or peptide sequence information from an hMPV isolate or a number of hMPV isolates is compared or aligned with sequences of other viruses. In another embodiment, phylogenetic approaches are applied to sequence alignment data so that phylogenetic relationships can be inferred and/or phylogenetic trees constructed. Any method or approach that uses nucleotide or peptide sequence information to compare hMPV isolates can be used to infer said phylogenetic relationships, including, but not limited to, distance, maximum likelihood, and maximum parsimony methods or approaches.

[0643] Other methods for the phylogenetic analysis are disclosed in International Patent Application PCT/NL02/00040, published as WO 02/057302, which is incorporated in its entirety herein. In particular, PCT/NL02/00040 discloses nucleic acid sequences that are suitable for phylogenetic analysis at page 12, line 27 to page 19, line 29, which is incorporated herein by reference.

[0644] For the phylogenetic analyses it is most useful to obtain the nucleic acid sequence of a non-MPV as outgroup with which the virus is to be compared, a very useful outgroup isolate can be obtained from avian pneumovirus serotype C (APV-C), see, e.g., FIG. 16.

[0645] Many methods and programs are known in the art and can be used in the inference of phylogenetic relationships, including, but not limited to BioEdit, ClustalW, TreeView, and NJPlot. Methods that would be used to align sequences and to generate phylogenetic trees or relationships would require the input of sequence information to be compared. Many methods or formats are known in the art and can be used to input sequence information, including, but not limited to, FASTA, NBRF, EMBL/SWISS, GDE protein, GDE nucleotide, CLUSTAL, and GCG/MSF. Methods that would be used to align sequences and to generate phylogenetic trees or relationships would require the output of results. Many methods or formats can be used in the output of information or results, including, but not limited to, CLUSTAL, NBRF/PIR, MSF, PHYLIP, and GDE. In one embodiment, ClustalW is used in conjunction with DNA maximum likelihood methods with 100 bootstraps and 3 jumbles in order to generate phylogenetic relationships.

[0646] 4.8.10.2 Alignment of Sequences

[0647] Two or more amino acid sequences can be compared by BLAST (Altschul, S. F. et al., 1990, J. Mol. Biol. 215:403-410) to determine their sequence homology and sequence identities to each other. Two or more nucleotide sequences can be compared by BLAST (Altschul, S. F. et al., 1990, J. Mol. Biol. 215:403-410) to determine their sequence homology and sequence identities to each other. BLAST comparisons can be performed using the Clustal W method (MacVector™). In certain specific embodiments, the alignment of two or more sequences by a computer program can be followed by manual re-adjustment.

[0648] The determination of percent identity between two sequences can be accomplished using a mathematical algorithm. A preferred, non-limiting example of a mathematical algorithm utilized for the comparison of two sequences is the algorithm of Karlin and Altschul, 1990, Proc. Natl. Acad. Sci. USA 87:2264-2268, modified as in Karlin and Altschul, 1993, Proc. Natl. Acad. Sci. USA 90:5873-5877. Such an algorithm is incorporated into the NBLAST and XBLAST programs of Altschul et al., 1990, J. Mol. Biol. 215:403-410. BLAST nucleotide comparisons can be performed with the NBLAST program. BLAST amino acid sequence comparisons can be performed with the XBLAST program. To obtain gapped alignments for comparison purposes, Gapped BLAST can be utilized as described in Altschul et al., 1997, Nucleic Acids Res.25:3389-3402. Alternatively, PSI-Blast can be used to perform an iterated search which detects distant relationships between molecules (Altschul et al., 1997, supra). When utilizing BLAST, Gapped BLAST, and PSI-Blast programs, the default parameters of the respective programs (e.g., XBLAST and NBLAST) can be used (see http://www.ncbi.nlm.nih.gov). Another preferred, non-limiting example of a mathematical algorithm utilized for the comparison of sequences is the algorithm of Myers and Miller, 1988, CABIOS 4:11-17. Such an algorithm is incorporated into the ALIGN program (version 2.0) which is part of the GCG sequence alignment software package. When utilizing the ALIGN program for comparing amino acid sequences, a PAM120 weight residue table can be used. The gap length penalty can be set by the skilled artisan. The percent identity between two sequences can be determined using techniques similar to those described above, with or without allowing gaps. In calculating percent identity, typically only exact matches are counted.

[0649] 4.8.10.3 Hybridization Conditions

[0650] A nucleic acid which is hybridizable to a nucleic acid of a mammalian MPV, or to its reverse complement, or to its complement can be used in the methods of the invention to determine their sequence homology and identities to each other. In certain embodiments, the nucleic acids are hybridized under conditions of high stringency. By way of example and not limitation, procedures using such conditions of high stringency are as follows. Prehybridization of filters containing DNA is carried out for 8 h to overnight at 65 C in buffer composed of 6×SSC, 50 mM Tris-HCl (pH 7.5), 1 mM EDTA, 0.02% PVP, 0.02% Ficoll, 0.02% BSA, and 500 μg/ml denatured salmon sperm DNA. Filters are hybridized for 48 h at 65 C in prehybridization mixture containing 100 μg/ml denatured salmon sperm DNA and 5-20×106 cpm of ³²P-labeled probe. Washing of filters is done at 37 C for 1 h in a solution containing 2×SSC, 0.01% PVP, 0.01% Ficoll, and 0.01% BSA. This is followed by a wash in 0.1×SSC at 50 C for 45 min before autoradiography. Other conditions of high stringency which may be used are well known in the art. In other embodiments of the invention, hybridization is performed under moderate of low stringency conditions, such conditions are well-known to the skilled artisan (see e.g., Sambrook et al., 1989, Molecular Cloning, A Laboratory Manual, 2d Ed., Cold Spring Harbor Laboratory Press, Cold Spring Harbor, N.Y.; see also, Ausubel et al., eds., in the Current Protocols in Molecular Biology series of laboratory technique manuals, 1987-1997 Current Protocols,© 1994-1997 John Wiley and Sons, Inc.).

TABLE 5
LEGEND FOR SEQUENCE LISTING

| | |
|---|---|
| SEQ ID NO: 1 | Human metapneumovirus isolate 00-1 matrix protein |
| | (M) and fusion protein (F) genes |
| SEQ ID NO: 2 | Avian pneumovirus fusion protein gene, partial cds |
| SEQ ID NO: 3 | Avian pneumovirus isolate 1b fusion protein |
| | mRNA, complete cds |
| SEQ ID NO: 4 | Turkey rhinotracheitis virus gene for fusion |
| | protein (F1 and F2 subunits), complete cds |
| SEQ ID NO: 5 | Avian pneumovirus matrix protein (M) gene, partial |
| | cds and Avian pneumovirus fusion glycoprotein (F) |
| | gene, complete cds |
| SEQ ID NO: 6 | paramyxovirus F protein hRSV B |
| SEQ ID NO: 7 | paramyxovirus F protein hRSV A2 |
| SEQ ID NO: 8 | human metapneumovirus01-71 (partial sequence) |
| SEQ ID NO: 9 | Human metapneumovirus isolate 00-1 matrix |
| | protein(M) and fusion protein (F) genes |
| SEQ ID NO: 10 | Avian pneumovirus fusion protein gene, partial cds |
| SEQ ID NO: 11 | Avian pneumovirus isolate 1b fusion protein |
| | mRNA, complete cds |
| SEQ ID NO: 12 | Turkey rhinotracheitis virus gene for fusion |
| | protein (F1 and F2 subunits), complete cds |
| SEQ ID NO: 13 | Avian pneumovirus fusion glycoprotein (F) gene, |
| | complete cds |
| SEQ ID NO: 14 | Turkey rhinotracheitis virus (strain |
| | CVL14/1)attachment protien (G) mRNA, complete cds |
| SEQ ID NO: 15 | Turkey rhinotracheitis virus (strain |
| | 6574) attachment protein (G), complete cds |
| SEQ ID NO: 16 | Turkey rhinotracheitis virus (strain |
| | CVL14/1)attachment protein (G) mRNA, complete cds |
| SEQ ID NO: 17 | Turkey rhinotracheitis virus (strain |
| | 6574)attachment protein (G), complete cds |
| SEQ ID NO: 18 | isolate NL/1/99 (99-1) HMPV (Human |
| | Metapneumovirus) cDNA sequence |
| SEQ ID NO: 19 | isolate NL/1/00 (00-1) HMPV cDNA sequence |
| SEQ ID NO: 20 | isolate NL/17/00 HMPV cDNA sequence |
| SEQ ID NO: 21 | isolate NL/1/94 HMPV cDNA sequence |
| SEQ ID NO: 22 | RT-PCR primer TR1 |
| SEQ ID NO: 23 | RT-PCR primer N1 |
| SEQ ID NO: 24 | RT-PCR primer N2 |
| SEQ ID NO: 25 | RT-PCR primer M1 |
| SEQ ID NO: 26 | RT-PCR primer M2 |
| SEQ ID NO: 27 | RT-PCR primer F1 |
| SEQ ID NO: 28 | RT-PCR primer N3 |
| SEQ ID NO: 29 | RT-PCR primer N4 |
| SEQ ID NO: 30 | RT-PCR primer M3 |
| SEQ ID NO: 31 | RT-PCR primer M4 |
| SEQ ID NO: 32 | RT-PCR primer F7 |
| SEQ ID NO: 33 | RT-PCR primer F8 |
| SEQ ID NO: 34 | RT-PCR primer L6 |
| SEQ ID NO: 35 | RT-PCR primer L7 |
| SEQ ID NO: 36 | Oligonucleotide probe M |
| SEQ ID NO: 37 | Oligonucleotide probe N |
| SEQ ID NO: 38 | Oligonucleotide probe L |
| SEQ ID NO: 39 | TaqMan primer and probe sequences for isolates |
| | NL/1/00, BI/1/01, FI/4/01, NL/8/01, FI/2/01 |
| SEQ ID NO: 40 | TaqMan primer and probe sequences for isolates |
| | NL/30/01 |
| SEQ ID NO: 41 | TaqMan primer and probe sequences for isolates |
| | NL/22/01 and NL/23/01 |
| SEQ ID NO: 42 | TaqMan primer and probe sequences for isolate |
| | NL/17/01 |
| SEQ ID NO: 43 | TaqMan primer and probe sequences for isolate |
| | NL/17/00 |
| SEQ ID NO: 44 | TaqMan primer and probe sequences for isolates |
| | NL/9/01, NL/21/01, and NL/5/01 |
| SEQ ID NO: 45 | TaqMan primer and probe sequences for isolates |
| | FI/1/01 and FI/10/01 |
| SEQ ID NO: 46 | Primer ZF1 |
| SEQ ID NO: 47 | Primer ZF4 |
| SEQ ID NO: 48 | Primer ZF7 |
| SEQ ID NO: 49 | Primer ZF10 |
| SEQ ID NO: 50 | Primer ZF13 |
| SEQ ID NO: 51 | Primer ZF16 |
| SEQ ID NO: 52 | Primer CS1 |
| SEQ ID NO: 53 | Primer CS4 |
| SEQ ID NO: 54 | Primer CS7 |
| SEQ ID NO: 55 | Primer CS10 |
| SEQ ID NO: 56 | Primer CS13 |
| SEQ ID NO: 57 | Primer CS16 |
| SEQ ID NO: 58 | Forward primer for amplification of HPIV-1 |
| SEQ ID NO: 59 | Reverse primer for amplification of HPIV-1 |
| SEQ ID NO: 60 | Forward primer for amplification of HPIV-2 |
| SEQ ID NO: 61 | Reverse primer for amplification of HPIV-2 |
| SEQ ID NO: 62 | Forward primer for amplification of HPIV-3 |
| SEQ ID NO: 63 | Reverse primer for amplification of HPIV-3 |
| SEQ ID NO: 64 | Forward primer for amplification of HPIV-4 |
| SEQ ID NO: 65 | Reverse primer for amplification of HPIV-4 |
| SEQ ID NO: 66 | Forward primer for amplification of Mumps |
| SEQ ID NO: 67 | Reverse primer for amplification of Mumps |
| SEQ ID NO: 68 | Forward primer for amplification of NDV |
| SEQ ID NO: 69 | Reverse primer for amplification of NDV |
| SEQ ID NO: 70 | Forward primer for amplification of Tupaia |
| SEQ ID NO: 71 | Reverse primer for amplification of Tupaia |
| SEQ ID NO: 72 | Forward primer for amplification of Mapuera |
| SEQ ID NO: 73 | Reverse primer for amplification of Mapuera |
| SEQ ID NO: 74 | Forward primer for amplification of Hendra |
| SEQ ID NO: 75 | Reverse primer for amplification of Hendra |
| SEQ ID NO: 76 | Forward primer for amplification of Nipah |
| SEQ ID NO: 77 | Reverse primer for amplification of Nipah |
| SEQ ID NO: 78 | Forward primer for amplification of HRSV |
| SEQ ID NO: 79 | Reverse primer for amplification of HRSV |
| SEQ ID NO: 80 | Forward primer for amplification of Measles |
| SEQ ID NO: 81 | Reverse primer for amplification of Measles |
| SEQ ID NO: 82 | Forward primer to amplify general |
| | paramyxoviridae viruses |
| SEQ ID NO: 83 | Reverse primer to amplify general paramyxoviridae |
| | viruses |
| SEQ ID NO: 84 | G-gene coding sequence for isolate NL/1/00 (A1) |
| SEQ ID NO: 85 | G-gene coding sequence for isolate BR/2/01 (A1) |
| SEQ ID NO: 86 | G-gene coding sequence for isolate FL/4/01 (A1) |
| SEQ ID NO: 87 | G-gene coding sequence for isolate FL/3/01 (A1) |
| SEQ ID NO: 88 | G-gene coding sequence for isolate FL/8/01 (A1) |
| SEQ ID NO: 89 | G-gene coding sequence for isolate FL/10/01 (A1) |
| SEQ ID NO: 90 | G-gene coding sequence for isolate NL/10/01 (A1) |
| SEQ ID NO: 91 | G-gene coding sequence for isolate NL/2/02 (A1) |
| SEQ ID NO: 92 | G-gene coding sequence for isolate NL/17/00 (A2) |
| SEQ ID NO: 93 | G-gene coding sequence for isolate NL/1/81 (A2) |
| SEQ ID NO: 94 | G-gene coding sequence for isolate NL/1/93 (A2) |
| SEQ ID NO: 95 | G-gene coding sequence for isolate NL/2/93 (A2) |
| SEQ ID NO: 96 | G-gene coding sequence for isolate NL/3/93 (A2) |
| SEQ ID NO: 97 | G-gene coding sequence for isolate NL/1/95 (A2) |
| SEQ ID NO: 98 | G-gene coding sequence for isolate NL/2/96 (A2) |
| SEQ ID NO: 99 | G-gene coding sequence for isolate NL/3/96 (A2) |
| SEQ ID NO: 100 | G-gene coding sequence for isolate NL/22/01 |
| | (A2) |
| SEQ ID NO: 101 | G-gene coding sequence for isolate NL/24/01 |
| | (A2) |
| SEQ ID NO: 102 | G-gene coding sequence for isolate NL/23/01 |
| | (A2) |
| SEQ ID NO: 103 | G-gene coding sequence for isolate NL/29/01 |
| | (A2) |
| SEQ ID NO: 104 | G-gene coding sequence for isolate NL/3/02 (A2) |
| SEQ ID NO: 105 | G-gene coding sequence for isolate NL/1/99 (B1) |
| SEQ ID NO: 106 | G-gene coding sequence for isolate NL/11/00 |
| | (B1) |
| SEQ ID NO: 107 | G-gene coding sequence for isolate NL/12/00 |
| | (B1) |
| SEQ ID NO: 108 | G-gene coding sequence for isolate NL/5/01 (B1) |
| SEQ ID NO: 109 | G-gene coding sequence for isolate NL/9/01 (B1) |
| SEQ ID NO: 110 | G-gene coding sequence for isolate NL/21/01 |
| | (B1) |
| SEQ ID NO: 111 | G-gene coding sequence for isolate NL/1/94 (B2) |
| SEQ ID NO: 112 | G-gene coding sequence for isolate NL/1/82 (B2) |
| SEQ ID NO: 113 | G-gene coding sequence for isolate NL/1/96 (B2) |
| SEQ ID NO: 114 | G-gene coding sequence for isolate NL/6/97 (B2) |
| SEQ ID NO: 115 | G-gene coding sequence for isolate NL/9/00 (B2) |
| SEQ ID NO: 116 | G-gene coding sequence for isolate NL/3/01 (B2) |
| SEQ ID NO: 117 | G-gene coding sequence for isolate NL/4/01 (B2) |
| SEQ ID NO: 118 | G-gene coding sequence for isolate UK/5/01 (B2) |
| SEQ ID NO: 119 | G-protein sequence for isolate NL/1/00 (A1) |
| SEQ ID NO: 120 | G-protein sequence for isolate BR/2/01 (A1) |
| SEQ ID NO: 121 | G-protein sequence for isolate FL/4/01 (A1) |
| SEQ ID NO: 122 | G-protein sequence for isolate FL/3/01 (A1) |
| SEQ ID NO: 123 | G-protein sequence for isolate FL/8/01 (A1) |
| SEQ ID NO: 124 | G-protein sequence for isolate FL/10/01 (A1) |
| SEQ ID NO: 125 | G-protein sequence for isolate NL/10/01 (A1) |
| SEQ ID NO: 126 | G-protein sequence for isolate NL/2/02 (A1) |
| SEQ ID NO: 127 | G-protein sequence for isolate NL/17/00 (A2) |
| SEQ ID NO: 128 | G-protein sequence for isolate NL/1/81 (A2) |
| SEQ ID NO: 129 | G-protein sequence for isolate NL/1/93 (A2) |
| SEQ ID NO: 130 | G-protein sequence for isolate NL/2/93 (A2) |
| SEQ ID NO: 131 | G-protein sequence for isolate NL/3/93 (A2) |
| SEQ ID NO: 132 | G-protein sequence for isolate NL/1/95 (A2) |
| SEQ ID NO: 133 | G-protein sequence for isolate NL/2/96 (A2) |
| SEQ ID NO: 134 | G-protein sequence for isolate NL/3/96 (A2) |
| SEQ ID NO: 135 | G-protein sequence for isolate NL/22/01 (A2) |
| SEQ ID NO: 136 | G-protein sequence for isolate NL/24/01 (A2) |
| SEQ ID NO: 137 | G-protein sequence for isolate NL/23/01 (A2) |
| SEQ ID NO: 138 | G-protein sequence for isolate NL/29/01 (A2) |
| SEQ ID NO: 139 | G-protein sequence for isolate NL/3/02 (A2) |
| SEQ ID NO: 140 | G-protein sequence for isolate NL/1/99 (B1) |
| SEQ ID NO: 141 | G-protein sequence for isolate NL/11/00 (B1) |
| SEQ ID NO: 142 | G-protein sequence for isolate NL/12/00 (B1) |
| SEQ ID NO: 143 | G-protein sequence for isolate NL/5/01 (B1) |
| SEQ ID NO: 144 | G-protein sequence for isolate NL/9/01 (B1) |
| SEQ ID NO: 145 | G-protein sequence for isolate NL/21/01 (B1) |
| SEQ ID NO: 146 | G-protein sequence for isolate NL/1/94 (B2) |
| SEQ ID NO: 147 | G-protein sequence for isolate NL/1/82 (B2) |
| SEQ ID NO: 148 | G-protein sequence for isolate NL/1/96 (B2) |
| SEQ ID NO: 149 | G-protein sequence for isolate NL/6/97 (B2) |
| SEQ ID NO: 150 | G-protein sequence for isolate NL/9/00 (B2) |
| SEQ ID NO: 151 | G-protein sequence for isolate NL/3/01 (B2) |
| SEQ ID NO: 152 | G-protein sequence for isolate NL/4/01 (B2) |
| SEQ ID NO: 153 | G-protein sequence for isolate NL/5/01 (B2) |
| SEQ ID NO: 154 | F-gene coding sequence for isolate NL/1/00 |
| SEQ ID NO: 155 | F-gene coding sequence for isolate UK/1/00 |
| SEQ ID NO: 156 | F-gene coding sequence for isolate NL/2/00 |
| SEQ ID NO: 157 | F-gene coding sequence for isolate NL/13/00 |
| SEQ ID NO: 158 | F-gene coding sequence for isolate NL/14/00 |
| SEQ ID NO: 159 | F-gene coding sequence for isolate FL/3/01 |
| SEQ ID NO: 160 | F-gene coding sequence for isolate FL/4/01 |
| SEQ ID NO: 161 | F-gene coding sequence for isolate FL/8/01 |
| SEQ ID NO: 162 | F-gene coding sequence for isolate UK/1/01 |
| SEQ ID NO: 163 | F-gene coding sequence for isolate UK/7/01 |
| SEQ ID NO: 164 | F-gene coding sequence for isolate FL/10/01 |
| SEQ ID NO: 165 | F-gene coding sequence for isolate NL/6/01 |
| SEQ ID NO: 166 | F-gene coding sequence for isolate NL/8/01 |
| SEQ ID NO: 167 | F-gene coding sequence for isolate NL/10/01 |
| SEQ ID NO: 168 | F-gene coding sequence for isolate NL/14/01 |
| SEQ ID NO: 169 | F-gene coding sequence for isolate NL/20/01 |
| SEQ ID NO: 170 | F-gene coding sequence for isolate NL/25/01 |
| SEQ ID NO: 171 | F-gene coding sequence for isolate NL/26/01 |
| SEQ ID NO: 172 | F-gene coding sequence for isolate NL/28/01 |
| SEQ ID NO: 173 | F-gene coding sequence for isolate NL/30/01 |
| SEQ ID NO: 174 | F-gene coding sequence for isolate BR/2/01 |
| SEQ ID NO: 175 | F-gene coding sequence for isolate BR/3/01 |
| SEQ ID NO: 176 | F-gene coding sequence for isolate NL/2/02 |
| SEQ ID NO: 177 | F-gene coding sequence for isolate NL/4/02 |
| SEQ ID NO: 178 | F-gene coding sequence for isolate NL/5/02 |
| SEQ ID NO: 179 | F-gene coding sequence for isolate NL/6/02 |
| SEQ ID NO: 180 | F-gene coding sequence for isolate NL/7/02 |
| SEQ ID NO: 181 | F-gene coding sequence for isolate NL/9/02 |
| SEQ ID NO: 182 | F-gene coding sequence for isolate FL/1/02 |
| SEQ ID NO: 183 | F-gene coding sequence for isolate NL/1/81 |
| SEQ ID NO: 184 | F-gene coding sequence for isolate NL/1/93 |
| SEQ ID NO: 185 | F-gene coding sequence for isolate NL/2/93 |
| SEQ ID NO: 186 | F-gene coding sequence for isolate NL/4/93 |
| SEQ ID NO: 187 | F-gene coding sequence for isolate NL/1/95 |
| SEQ ID NO: 188 | F-gene coding sequence for isolate NL/2/96 |
| SEQ ID NO: 189 | F-gene coding sequence for isolate NL/3/96 |
| SEQ ID NO: 190 | F-gene coding sequence for isolate NL/1/98 |
| SEQ ID NO: 191 | F-gene coding sequence for isolate NL/17/00 |
| SEQ ID NO: 192 | F-gene coding sequence for isolate NL/22/01 |
| SEQ ID NO: 193 | F-gene coding sequence for isolate NL/29/01 |
| SEQ ID NO: 194 | F-gene coding sequence for isolate NL/23/01 |
| SEQ ID NO: 195 | F-gene coding sequence for isolate NL/17/01 |
| SEQ ID NO: 196 | F-gene coding sequence for isolate NL/24/01 |
| SEQ ID NO: 197 | F-gene coding sequence for isolate NL/3/02 |
| SEQ ID NO: 198 | F-gene coding sequence for isolate NL/3/98 |
| SEQ ID NO: 199 | F-gene coding sequence for isolate NL/1/99 |
| SEQ ID NO: 200 | F-gene coding sequence for isolate NL/2/99 |
| SEQ ID NO: 201 | F-gene coding sequence for isolate NL/3/99 |
| SEQ ID NO: 202 | F-gene coding sequence for isolate NL/11/00 |
| SEQ ID NO: 203 | F-gene coding sequence for isolate NL/12/00 |
| SEQ ID NO: 204 | F-gene coding sequence for isolate NL/1/01 |
| SEQ ID NO: 205 | F-gene coding sequence for isolate NL/5/01 |
| SEQ ID NO: 206 | F-gene coding sequence for isolate NL/9/01 |
| SEQ ID NO: 207 | F-gene coding sequence for isolate NL/19/01 |
| SEQ ID NO: 208 | F-gene coding sequence for isolate NL/21/01 |
| SEQ ID NO: 209 | F-gene coding sequence for isolate |
| | UK/11/01 |
| SEQ ID NO: 210 | F-gene coding sequence for isolate FL/1/01 |
| SEQ ID NO: 211 | F-gene coding sequence for isolate FL/2/01 |
| SEQ ID NO: 212 | F-gene coding sequence for isolate FL/5/01 |
| SEQ ID NO: 213 | F-gene coding sequence for isolate FL/7/01 |
| SEQ ID NO: 214 | F-gene coding sequence for isolate FL/9/01 |
| SEQ ID NO: 215 | F-gene coding sequence for isolate UK/10/01 |
| SEQ ID NO: 216 | F-gene coding sequence for isolate NL/1/02 |
| SEQ ID NO: 217 | F-gene coding sequence for isolate NL/1/94 |
| SEQ ID NO: 218 | F-gene coding sequence for isolate NL/1/96 |
| SEQ ID NO: 219 | F-gene coding sequence for isolate NL/6/97 |
| SEQ ID NO: 220 | F-gene coding sequence for isolate NL/7/00 |
| SEQ ID NO: 221 | F-gene coding sequence for isolate NL/9/00 |
| SEQ ID NO: 222 | F-gene coding sequence for isolate NL/19/00 |
| SEQ ID NO: 223 | F-gene coding sequence for isolate NL/28/00 |
| SEQ ID NO: 224 | F-gene coding sequence for isolate NL/3/01 |
| SEQ ID NO: 225 | F-gene coding sequence for isolate NL/4/01 |
| SEQ ID NO: 226 | F-gene coding sequence for isolate NL/11/01 |
| SEQ ID NO: 227 | F-gene coding sequence for isolate NL/15/01 |
| SEQ ID NO: 228 | F-gene coding sequence for isolate NL/18/01 |
| SEQ ID NO: 229 | F-gene coding sequence for isolate FL/6/01 |
| SEQ ID NO: 230 | F-gene coding sequence for isolate UK/5/01 |
| SEQ ID NO: 231 | F-gene coding sequence for isolate UK/8/01 |
| SEQ ID NO: 232 | F-gene coding sequence for isolate NL/12/02 |
| SEQ ID NO: 233 | F-gene coding sequence for isolate HK/1/02 |
| SEQ ID NO: 234 | F-protein sequence for isolate NL/1/00 |
| SEQ ID NO: 235 | F-protein sequence for isolate UK/1/00 |
| SEQ ID NO: 236 | F-protein sequence for isolate NL/2/00 |
| SEQ ID NO: 237 | F-protein sequence for isolate NL/13/00 |
| SEQ ID NO: 238 | F-protein sequence for isolate NL/14/00 |
| SEQ ID NO: 239 | F-protein sequence for isolate FL/3/01 |
| SEQ ID NO: 240 | F-protein sequence for isolate FL/4/01 |
| SEQ ID NO: 241 | F-protein sequence for isolate FL/8/01 |
| SEQ ID NO: 242 | F-protein sequence for isolate UK/1/01 |
| SEQ ID NO: 243 | F-protein sequence for isolate UK/7/01 |
| SEQ ID NO: 244 | F-protein sequence for isolate FL/10/01 |
| SEQ ID NO: 245 | F-protein sequence for isolate NL/6/01 |
| SEQ ID NO: 246 | F-protein sequence for isolate NL/8/01 |
| SEQ ID NO: 247 | F-protein sequence for isolate NL/10/01 |
| SEQ ID NO: 248 | F-protein sequence for isolate NL/14/01 |
| SEQ ID NO: 249 | F-protein sequence for isolate NL/20/01 |
| SEQ ID NO: 250 | F-protein sequence for isolate NL/25/01 |
| SEQ ID NO: 251 | F-protein sequence for isolate NL/26/01 |
| SEQ ID NO: 252 | F-protein sequence for isolate NL/28/01 |
| SEQ ID NO: 253 | F-protein sequence for isolate NL/30/01 |
| SEQ ID NO: 254 | F-protein sequence for isolate BR/2/01 |
| SEQ ID NO: 255 | F-protein sequence for isolate BR/3/01 |
| SEQ ID NO: 256 | F-protein sequence for isolate NL/2/02 |
| SEQ ID NO: 257 | F-protein sequence for isolate NL/4/02 |
| SEQ ID NO: 258 | F-protein sequence for isolate NL/5/02 |
| SEQ ID NO: 259 | F-protein sequence for isolate NL/6/02 |
| SEQ ID NO: 260 | F-protein sequence for isolate NL/7/02 |
| SEQ ID NO: 261 | F-protein sequence for isolate NL/9/02 |
| SEQ ID NO: 262 | F-protein sequence for isolate FL/1/02 |
| SEQ ID NO: 263 | F-protein sequence for isolate NL/1/81 |
| SEQ ID NO: 264 | F-protein sequence for isolate NL/1/93 |
| SEQ ID NO: 265 | F-protein sequence for isolate NL/2/93 |
| SEQ ID NO: 266 | F-protein sequence for isolate NL/4/93 |
| SEQ ID NO: 267 | F-protein sequence for isolate NL/1/95 |
| SEQ ID NO: 268 | F-protein sequence for isolate NL/2/96 |
| SEQ ID NO: 269 | F-protein sequence for isolate NL/3/96 |
| SEQ ID NO: 270 | F-protein sequence for isolate NL/1/98 |
| SEQ ID NO: 271 | F-protein sequence for isolate NL/17/00 |
| SEQ ID NO: 272 | F-protein sequence for isolate NL/22/01 |
| SEQ ID NO: 273 | F-protein sequence for isolate NL/29/01 |
| SEQ ID NO: 274 | F-protein sequence for isolate NL/23/01 |
| SEQ ID NO: 275 | F-protein sequence for isolate NL/17/01 |
| SEQ ID NO: 276 | F-protein sequence for isolate NL/24/01 |
| SEQ ID NO: 277 | F-protein sequence for isolate NL/3/02 |
| SEQ ID NO: 278 | F-protein sequence for isolate NL/3/98 |
| SEQ ID NO: 279 | F-protein sequence for isolate NL/1/99 |
| SEQ ID NQ: 280 | F-protein sequence for isolate NL/2/99 |
| SEQ ID NO: 281 | F-protein sequence for isolate NL/3/99 |
| SEQ ID NO: 282 | F-protein sequence for isolate NL/11/00 |
| SEQ ID NO: 283 | F-protein sequence for isolate NL/12/00 |
| SEQ ID NO: 284 | F-protein sequence for isolate NL/1/01 |
| SEQ ID NO: 285 | F-protein sequence for isolate NL/5/01 |
| SEQ ID NO: 286 | F-protein sequence for isolate NL/9/01 |
| SEQ ID NO: 287 | F-protein sequence for isolate NL/19/01 |
| SEQ ID NO: 288 | F-protein sequence for isolate NL/21/01 |
| SEQ ID NO: 289 | F-protein sequence for isolate UK/11/01 |
| SEQ ID NO: 290 | F-protein sequence for isolate FL/1/01 |
| SEQ ID NO: 291 | F-protein sequence for isolate FL/2/01 |
| SEQ ID NO: 292 | F-protein sequence for isolate FL/5/01 |
| SEQ ID NO: 293 | F-protein sequence for isolate FL/7/01 |
| SEQ ID NO: 294 | F-protein sequence for isolate FL/9/01 |
| SEQ ID NO: 295 | F-protein sequence for isolate UK/10/01 |
| SEQ ID NO: 296 | F-protein sequence for isolate NL/1/02 |
| SEQ ID NO: 297 | F-protein sequence for isolate NL/1/94 |
| SEQ ID NO: 298 | F-protein sequence for isolate NL/1/96 |
| SEQ ID NO: 299 | F-protein sequence for isolate NL/6/97 |
| SEQ ID NO: 300 | F-protein sequence for isolate NL/7/00 |
| SEQ ID NO: 301 | F-protein sequence for isolate NL/9/00 |
| SEQ ID NO: 302 | F-protein sequence for isolate NL/19/00 |
| SEQ ID NO: 303 | F-protein sequence for isolate NL/28/00 |
| SEQ ID NO: 304 | F-protein sequence for isolate NL/3/01 |
| SEQ ID NO: 305 | F-protein sequence for isolate NL/4/01 |
| SEQ ID NO: 306 | F-protein sequence for isolate NL/11/01 |
| SEQ ID NO: 307 | F-protein sequence for isolate NL/15/01 |
| SEQ ID NO: 308 | F-protein sequence for isolate NL/18/01 |
| SEQ ID NO: 309 | F-protein sequence for isolate FL/6/01 |
| SEQ ID NO: 310 | F-protein sequence for isolate UK/5/01 |
| SEQ ID NO: 311 | F-protein sequence for isolate UK/8/01 |
| SEQ ID NO: 312 | F-protein sequence for isolate NL/12/02 |
| SEQ ID NO: 313 | F-protein sequence for isolate HK/1/02 |
| SEQ ID NO: 314 | F protein sequence for HMPV isolate NL/1/00 |
| SEQ ID NO: 315 | F protein sequence for HMPV isolate NL/17/00 |
| SEQ ID NO: 316 | F protein sequence for HMPV isolate NL/1/99 |
| SEQ ID NO: 317 | F protein sequence for HMPV isolate NL/1/94 |
| SEQ ID NO: 318 | F-gene sequence for HMPV isolate NL/1/00 |
| SEQ ID NO: 319 | F-gene sequence for HMPV isolate NL/17/00 |
| SEQ ID NO: 320 | F-gene sequence for HMPV isolate NL/1/99 |
| SEQ ID NO: 321 | F-gene sequence for HMPV isolate NL/1/94 |
| SEQ ID NO: 322 | G protein sequence for HMPV isolate NL/1/00 |
| SEQ ID NO: 323 | G protein sequence for HMPV isolate NL/17/00 |
| SEQ ID NO: 324 | G protein sequence for HMPV isolate NL/1/99 |
| SEQ ID NO: 325 | G protein sequence for HMPV isolate NL/1/94 |
| SEQ ID NO: 326 | G-gene sequence for HMPV isolate NL/1/00 |
| SEQ ID NO: 327 | G-gene sequence for HMPV isolate NL/17/00 |
| SEQ ID NO: 328 | G-gene sequence for HMPV isolate NL/1/99 |
| SEQ ID NO: 329 | G-gene sequence for HMPV isolate NL/1/94 |
| SEQ ID NO: 330 | L protein sequence for HMPV isolate NL/1/00 |
| SEQ ID NO: 331 | L protein sequence for HMPV isolate NL/17/00 |
| SEQ ID NO: 332 | L protein sequence for HMPV isolate NL/1/99 |
| SEQ ID NO: 333 | L protein sequence for HMPV isolate NL/1/94 |
| SEQ ID NO: 334 | L-gene sequence for HMPV isolate NL/1/00 |
| SEQ ID NO: 335 | L-gene sequence for HMPV isolate NL/17/00 |
| SEQ ID NO: 336 | L-gene sequence for HMPV isolate NL/1/99 |
| SEQ ID NO: 337 | L-gene sequence for HMPV isolate NL/1/94 |
| SEQ ID NO: 338 | M2-1 protein sequence for HMPV isolate NL/1/00 |
| SEQ ID NO: 339 | M2-1 protein sequence for HMPV isolate NL/17/00 |
| SEQ ID NO: 340 | M2-1 protein sequence for HMPV isolate NL/1/99 |
| SEQ ID NO: 341 | M2-1 protein sequence for HMPV isolate NL/1/94 |
| SEQ ID NO: 342 | M2-1 gene sequence for HMPV isolate NL/1/00 |
| SEQ ID NO: 343 | M2-1 gene sequence for HMPV isolate NL/17/00 |
| SEQ ID NO: 344 | M2-1 gene sequence for HMPV isolate NL/1/99 |
| SEQ ID NO: 345 | M2-1 gene sequence for HMPV isolate NL/1/94 |
| SEQ ID NO: 346 | M2-2 protein sequence for HMPV isolate NL/1/00 |
| SEQ ID NO: 347 | M2-2 protein sequence for HMPV isolate NL/17/00 |
| SEQ ID NO: 348 | M2-2 protein sequence for HMPV isolate NL/1/99 |
| SEQ ID NO: 349 | M2-2 protein sequence for HMPV isolate NL/1/94 |
| SEQ ID NO: 350 | M2-2 gene sequence for HMPV isolate NL/1/00 |
| SEQ ID NO: 351 | M2-2 gene sequence for HMPV isolate NL/17/00 |
| SEQ ID NO: 352 | M2-2 gene sequence for HMPV isolate NL/1/99 |
| SEQ ID NO: 353 | M2-2 gene sequence for HMPV isolate |
| | NL/1/94 |
| SEQ ID NO: 354 | M2 gene sequence for HMPV isolate NL/1/00 |
| SEQ ID NO: 355 | M2 gene sequence for HMPV isolate NL/17/00 |
| SEQ ID NO: 356 | M2 gene sequence for HMPV isolate NL/1/99 |
| SEQ ID NO: 357 | M2 gene sequence for HMPV isolate NL/1/94 |
| SEQ ID NO: 358 | M protein sequence for HMPV isolate NL/1/00 |
| SEQ ID NO: 359 | M protein sequence for HMPV isolate NL/17/00 |
| SEQ ID NO: 360 | M protein sequence for HMPV isolate NL/1/99 |
| SEQ ID NO: 361 | M protein sequence for HMPV isolate NL/1/94 |
| SEQ ID NO: 362 | M gene sequence for HMPV isolate NL/1/00 |
| SEQ ID NO: 363 | M gene sequence for HMPV isolate NL/17/00 |
| SEQ ID NO: 364 | M gene sequence for HMPV isolate NL/1/99 |
| SEQ ID NO: 365 | M gene sequence for HMPV isolate NL/1/94 |
| SEQ ID NO: 366 | N protein sequence for HMPV isolate NL/1/00 |
| SEQ ID NO: 367 | N protein sequence for HMPV isolate NL/17/00 |
| SEQ ID NO: 368 | N protein sequence for HMPV isolate NL/1/99 |
| SEQ ID NO: 369 | N protein sequence for HMPV isolate NL/1/94 |
| SEQ ID NO: 370 | N gene sequence for HMPV isolate NL/1/00 |
| SEQ ID NO: 371 | N gene sequence for HMPV isolate NL/17/00 |
| SEQ ID NO: 372 | N gene sequence for HMPV isolate NL/1/99 |
| SEQ ID NO: 373 | N gene sequence for HMPV isolate NL/1/94 |
| SEQ ID NO: 374 | P protein sequence for HMPV isolate NL/1/00 |
| SEQ ID NO: 375 | P protein sequence for HMPV isolate NL/17/00 |
| SEQ ID NO: 376 | P protein sequence for HMPV isolate NL/1/99 |
| SEQ ID NO: 377 | P protein sequence for HMPV isolate NL/1/94 |
| SEQ ID NO: 378 | P gene sequence for HMPV isolate NL/1/00 |
| SEQ ID NO: 379 | P gene sequence for HMPV isolate NL/17/00 |
| SEQ ID NO: 380 | P gene sequence for HMPV isolate NL/1/99 |
| SEQ ID NO: 381 | P gene sequence for HMPV isolate NL/1/94 |
| SEQ ID NO: 382 | SH protein sequence for HMPV isolate NL/1/00 |
| SEQ ID NO: 383 | SH protein sequence for HMPV isolate NL/17/00 |
| SEQ ID NO: 384 | SH protein sequence for HMPV isolate NL/1/99 |
| SEQ ID NO: 385 | SH protein sequence for HMPV isolate NL/1/94 |
| SEQ ID NO: 386 | SH gene sequence for HMPV isolate NL/1/00 |
| SEQ ID NO: 387 | SH gene sequence for HMPV isolate NL/17/00 |
| SEQ ID NO: 388 | SH gene sequence for HMPV isolate NL/1/99 |
| SEQ ID NO: 389 | SH gene sequence for HMPV isolate NL/1/94 |
| SEQ ID NO: 390 | attachment glycoprotein of Human respiratory |
| | syncytial virus |
| SEQ ID NO: 391 | fusion glycoprotein of Human respiratory |
| | syncytial virus |
| SEQ ID NO: 392 | small hydrophobic protein of Human respiratory |
| | syncytial virus |
| SEQ ID NO: 393 | RNA polymerase beta subunit (Large structural |
| | protein) (L protein) of Human respiratory |
| | syncytial virus |
| SEQ ID NO: 394 | phosphoprotein P of Human respiratory syncytial |
| | virus |
| SEQ ID NO: 395 | attachment glycoprotein G of Human respiratory |
| | syncytial virus |
| SEQ ID NO: 396 | nucleocapsid protein of Human respiratory |
| | syncytial virus |
| SEQ ID NO: 397 | nucleoprotein (N) of Human respiratory |
| | syncytial virus |
| SEQ ID NO: 398 | matrix protein of Human respiratory syncytial |
| | virus |
| SEQ ID NO: 399 | Nucleoprotein (N) |
| SEQ ID NO: 400 | Phosphoprotein (P) |
| SEQ ID NO: 401 | Matrix Protein (M) |
| SEQ ID NO: 402 | Matrix Protein 2-1 (M2) |
| SEQ ID NO: 403 | Matrix Protein 2-2 (M2) |
| SEQ ID NO: 404 | Small Hydrophobic Protein (SH) |
| SEQ ID NO: 405 | RNA-dependent RNA polymerase (L) of Human |
| | metapneumovirus |
| SEQ ID NO: 406 | RNA-dependent RNA polymerase (L) of Human |
| | metapneumovirus |
| SEQ ID NO: 407 | RNA polymerase alpha subunit (Nucleocapsid |
| | phosphoprotein) of Human parainfluenza 1 virus |
| SEQ ID NO: 408 | L polymerase protein of Human parainfluenza 1 |
| | virus |
| SEQ ID NO: 409 | HN glycoprotein of Human parainfluenza 1 virus |
| SEQ ID NO: 410 | matrix protein of Human parainfluenza 1 virus |
| SEQ ID NO: 411 | Y1 protein of Human parainfluenza 1 virus |
| SEQ ID NO: 412 | C protein of Human parainfluenza 1 virus |
| SEQ ID NO: 413 | phosphoprotein of Human parainfluenza 1 virus |
| SEQ ID NO: 414 | nucleoprotein of Human parainfluenza 1 virus |
| SEQ ID NO: 415 | F glycoprotein of Human parainfluenza 1 virus |
| SEQ ID NO: 416 | D protein of Human parainfluenza virus 3 |
| SEQ ID NO: 417 | hemagglutinin-neuraminidase of Human |
| | parainfluenza virus 3 |
| SEQ ID NO: 418 | nucleocapsid protein of Human parainfluenza |
| | virus 3 |
| SEQ ID NO: 419 | P protein of Human parainfluenza virus 2 |
| SEQ ID NO: 420 | F protein of Human parainfluenza virus |
| SEQ ID NO: 421 | G protein of Human parainfluenza virus |
| SEQ ID NO: 422 | Homo sapiens |
| SEQ ID NO: 423 | Homo sapiens |
| SEQ ID NO: 424 | Avian pneumovirus fusion protein gene |
| SEQ ID NO: 425 | Avian pneumovirus isolate 1b fusion protein |
| | mRNA |
| SEQ ID NO: 426 | Turkey rhinotracheitis virus gene for fusion |
| | protein (F1 and F2 subunits), complete cds |
| SEQ ID NO: 427 | Avian pneumovirus fusion glycoprotein (F) gene, |
| | complete cds |
| SEQ ID NO: 428 | Turkey rhinotracheitis virus (strain CVL14/1) |
| | attachment protien (G) mRNA, complete cds |
| SEQ ID NO: 429 | Turkey rhinotracheitis virus (strain 6574) |
| | attachment protein (G) |
| SEQ ID NO: 430 | Postulated HRA sequence of strain NL1/00 |
| SEQ ID NO: 431 | Postulated HRA sequence of strain NL17/00 |
| SEQ ID NO: 432 | Postulated HRA sequence of strain NL1/99 |
| SEQ ID NO: 433 | Postulated HRA sequence of strain NL1/94 |
| SEQ ID NO: 434 | Postulated HRB sequence of strain NL1/00 |
| SEQ ID NO: 435 | Postulated HRB sequence of strain NL17/00 |
| SEQ ID NO: 436 | Postulated HRB sequence of strain NL1/99 |
| SEQ ID NO: 437 | Postulated HRB sequence of strain NL1/94 |

[0651] Equivalents

[0652] Those skilled in the art will recognize, or be able to ascertain using no more than routine experimentation, many equivalents to the specific embodiments of the invention described herein. Such equivalents are intended to be encompassed by the following claims.

[0653] All publications, patents and patent applications mentioned in this specification are herein incorporated by reference into the specification to the same extent as if each individual publication, patent or patent application was specifically and individually indicated to be incorporated herein by reference.

What is claimed is:

1. A method of preventing a viral infection in a subject, said method comprising administering to the subject:
(i) a prophylactically effective amount of one or more first antibodies or antigen-binding fragments thereof, wherein one or more of said first antibodies or antigen-binding fragments thereof bind immunospecifically to a RSV antigen; and
(ii) a prophylactically effective amount of one or more second antibodies or antigen-binding fragments thereof, wherein one or more of said second antibodies or antigen-binding fragments thereof bind immunospecifically to a hMPV antigen.

2. The method of claim 1, wherein one or more of said first antibodies or antigen-binding fragments thereof neutralize RSV.

3. The method of claim 1, wherein one or more of said second antibodies or antigen-binding fragments thereof neutralize hMPV.

4. The method of claim 1, wherein one or more of said first antibodies or antigen-binding fragments thereof block RSV infection of cells of the subject.

5. The method of claim 1, wherein one or more of said second antibodies or antigen-binding fragments thereof block hMPV infection of cells of the subject.

6. A method of treating one or more symptoms of a respiratory viral infection in a subject, said method comprising administering to the subject:
(i) a therapeutically effective amount of one or more first antibodies or antigen-binding fragments thereof, wherein one or more of said first antibodies or antigen-binding fragments thereof bind immunospecifically to a RSV antigen; and
(ii) a therapeutically effective amount of one or more second antibodies or antigen-binding fragments thereof, wherein one or more of said second antibodies or antigen-binding fragments thereof bind immunospecifically to a hMPV antigen.

7. A method of passive immunotherapy, said method comprising administering to a subject:
(i) a first dose of one or more first antibodies or antigen-binding fragments thereof, wherein one or more of said first antibodies or a fragments thereof bind immunospecifically to a RSV antigen; and
(ii) a second dose of one or more second antibodies or antigen-binding fragments thereof, wherein one or more of said second antibodies or a fragments thereof bind immunospecifically to a hMPV antigen,
wherein the first dose reduces the incidence of RSV infection by at least 25% and wherein the second dose reduces the incidence of hMPV infection by at least 25%.

8. A method of passive immunotherapy, said method comprising administering to a subject:
(i) a first dose of one or more first antibodies or antigen-binding fragments thereof, wherein one or more of said first antibodies or antigen-binding fragments thereof bind immunospecifically to a RSV antigen; and
(ii) a second dose of one or more second antibodies or antigen-binding fragments thereof, wherein one or more of said second antibodies or antigen-binding fragments thereof bind immunospecifically to a hMPV antigen,
wherein the serum titer of one or more of said first antibodies or antigen-binding fragments thereof in the subject is at least 10 μg/ml after 15 days of administering one or more of said first antibodies or antigen-binding fragments thereof and wherein the serum titer of one or more of said second antibodies or antigen-binding fragments thereof in the subject is at least 10 μg/ml after 15 days of administering one or more of said second antibodies or antigen-binding fragments thereof.

9. The method of claim 1, 6, 7, or 8, wherein the amino acid sequence of the RSV antigen is that of SEQ ID NO:390 to 398, respectively.

10. The method of claim 1, 6, 7, or 8, wherein the amino acid sequence of the RSV antigen is 90% identical to the amino acid sequence of RSV nucleoprotein, RSV phosphoprotein, RSV matrix protein, RSV small hydrophobic protein, RSV RNA-dependent RNA polymerase, RSV F protein, or RSV G protein.

11. The method of claim 1, 6, 7, or 8, wherein the RSV antigen is selected from the group consisting of RSV nucleoprotein, RSV phosphoprotein, RSV matrix protein, RSV small hydrophobic protein, RSV RNA-dependent RNA polymerase, RSV F protein, and RSV G protein.

12. The method of claim 1, 6, 7, or 8, wherein one or more of said first antibodies immunospecifically bind to an antigen of Group A or Group B RSV.

13. The method of claim 1, 6, 7, or 8, wherein the RSV antigen is RSV F protein.

14. The method of claim 1, 6, 7, or 8, wherein one or more of said second antibodies cross-react with a turkey APV antigen.

15. The method of claim 1, 6, 7, or 8, wherein one or more of said second antibodies are (i) human or humanized antibodies and (ii) cross-react with a turkey APV antigen.

16. The method of claim 15, wherein said turkey APV antigen is selected from the group consisting of turkey APV nucleoprotein, turkey APV phosphoprotein, turkey APV matrix protein, turkey APV small hydrophobic protein, turkey APV RNA-dependent RNA polymerase, turkey APV F protein, and turkey APV G protein.

17. The method of claim 15, wherein said turkey APV antigen is an antigen of avian pneumovirus type A, avian pneumovirus type B, or avian pneumovirus type C.

18. The method of claim 15, wherein the amino acid sequence of said turkey APV antigen is that of SEQ ID NO:424 to 429, respectively.

19. The method of claim 1, 6, 7, or 8, wherein the amino acid sequence of the hMPV antigen is that of SEQ ID NO: 399-406, 420, or 421, respectively.

20. The method of claim 1, 6, 7, or 8, wherein the hMPV antigen is selected from the group consisting of hMPV nucleoprotein, hMPV phosphoprotein, hMPV matrix protein, hMPV small hydrophobic protein, hMPV RNA-dependent RNA polymerase, hMPV F protein, and hMPV G protein.

21. The method of claim 1, 6, 7, or 8, wherein the hMPV antigen is hMPV F protein.

22. The method of claim 1, 6, 7, or 8, wherein the first antibody is Palivizumab; AFFF; P12f2 P12f4; P11d4; Ale9; A12a6; A13c4; A17d4; A4B4; 1X-493L1; FR H3-3F4; M3H9; Y10H6; DG; AFFF(1); 6H8; L1-7E5; L2-15B10; A13a11; A1h5; A4B4(1);A4B4-F52S; or A4B4L1FR-S28R.

23. The method of claim 1, 6, 7, or 8, wherein one or more of said first antibodies or antigen-binding fragments thereof are administered at a time period prior to administering of one or more of said second antibodies or antigen-binding fragments thereof.

24. The method of claim 1, 6, 7, or 8, wherein one or more of said second antibodies or antigen-binding fragments thereof are administered at a time period prior to administering of one or more of said first antibodies or antigen-binding fragments thereof.

25. The method of claim 1, 6, 7, or 8, wherein one or more of said first antibodies or antigen-binding fragments thereof and one or more of said second antibodies or antigen-binding fragments thereof are administered concurrently.

26. The method of claim 1, 6, 7, or 8, wherein one or more of said first antibodies or antigen-binding fragments thereof are administered in a sequence of two or more administrations, wherein the administrations of one or more of said first antibodies or antigen-binding fragments thereof are separated by a time period from each other, and wherein one or more of said second antibodies or antigen-binding fragments thereof are administered before, during, or after the sequence.

27. The method of claim 1, 6, 7, or 8, wherein one or more of said first antibodies or antigen-binding fragments thereof are administered in a sequence of two or more administrations, wherein the administrations of one or more of said second antibodies or antigen-binding fragments thereof are separated by a time period from each other, and wherein one or more of said first antibodies or antigen-binding fragments thereof are administered before, during, or after the sequence.

28. The method of claim 1, 6, 7, or 8, wherein one or more of said first antibodies or antigen-binding fragments thereof and one or more of said second antibodies or antigen-binding fragments thereof are administered in a sequence of two or more administrations, wherein the administrations are separated by a time period from each other.

29. The method of claim 1 or 6, wherein the viral infection is an infection with RSV and hMPV or an infection with RSV and APV.

30. A method of preventing a viral infection in a subject, said method comprising administering to the subject:
(i) a dose of one or more antibodies or antigen-binding fragments thereof, wherein one or more of said antibodies or antigen-binding fragments thereof (i) are human or humanized, (ii) cross-react with a turkey APV antigen, and (iii) bind immunospecifically to a hMPV antigen.

31. A method of treating one or more symptoms of a respiratory viral infection in a subject, said method comprising administering to the subject:
(i) a dose of one or more antibodies or antigen-binding fragments thereof, wherein one or more of said antibodies or antigen-binding fragments thereof (i) are human or humanized, (ii) cross-react with a turkey APV antigen, and (iii) bind immunospecifically to a hMPV antigen.

32. A method of passive immunotherapy, said method comprising administering to a subject:
(i) a dose of one or more antibodies or antigen-binding fragments thereof, wherein one or more of said antibodies or antigen-binding fragments thereof (i) are human or humanized, (ii) cross-react with a turkey APV antigen, and (iii) bind immunospecifically to a hMPV antigen,
wherein the dose reduces the incidence of hMPV infection by at least 25%.

33. A method of passive immunotherapy, said method comprising administering to a subject:
(i) a dose of one or more antibodies or antigen-binding fragments thereof, wherein one or more of said antibodies or antigen-binding fragments thereof
(i) are human or humanized, (ii) cross-react with a turkey APV antigen, and (iii) bind immunospecifically to a hMPV antigen,
wherein the serum titer of one or more of said antibodies or antigen-binding fragments thereof in the subject is at least 10 μg/ml after 15 days of administering one or more of said antibodies or antigen-binding fragments thereof.

34. A pharmaceutical composition, said composition comprising:
(i) one or more first antibodies or antigen-binding fragments thereof, wherein one or more of said first antibodies or antigen-binding fragments thereof bind immunospecifically to a RSV antigen; and
(ii) one or more second antibodies or antigen-binding fragments thereof, wherein one or more of said second antibodies or antigen-binding fragments thereof bind immunospecifically to a hMPV antigen.

35. The pharmaceutical composition of claim 34, wherein the amino acid sequence of the RSV antigen is that of SEQ ID NO:390 to 398, respectively.

36. The pharmaceutical composition of claim 34, wherein the amino acid sequence of the RSV antigen is 90% identical to the amino acid sequence of RSV nucleoprotein, RSV phosphoprotein, RSV matrix protein, RSV small hydrophobic protein, RSV RNA-dependent RNA polymerase, RSV F protein, or RSV G protein.

37. The pharmaceutical composition of claim 34, wherein the RSV antigen is selected from the group consisting of RSV nucleoprotein, RSV phosphoprotein, RSV matrix protein, RSV small hydrophobic protein, RSV RNA-dependent RNA polymerase, RSV F protein, and RSV G protein.

38. The pharmaceutical composition of claim 34, wherein one or more of said first antibodies or antigen-binding fragments thereof immunospecifically bind to an antigen of Group A or Group B RSV.

39. The pharmaceutical composition of claim 34, wherein the RSV antigen is RSV F protein.

40. The pharmaceutical composition of claim 34, wherein one or more of said second antibodies cross-react with a turkey APV antigen.

41. The pharmaceutical composition of claim 34, wherein one or more of said second antibodies are (i) human or humanized antibodies and (ii) cross-react with a turkey APV antigen.

42. The pharmaceutical composition of claim 40, wherein said turkey APV antigen is selected from the group consisting of turkey APV nucleoprotein, turkey APV phosphoprotein, turkey APV matrix protein, turkey APV small hydrophobic protein, turkey APV RNA-dependent RNA polymerase, turkey APV F protein, and turkey APV G protein.

43. The pharmaceutical composition of claim 40, wherein said turkey APV antigen is an antigen of avian pneumovirus type A, avian pneumovirus type B, or avian pneumovirus type C.

44. The pharmaceutical composition of claim 40, wherein the amino acid sequence of said turkey APV antigen is that of SEQ ID NO:424 to 429, respectively.

45. The pharmaceutical composition of claim 34, wherein the amino acid sequence of the hMPV antigen is that of SEQ ID NO: 399-406, 420, or 421, respectively.

46. The pharmaceutical composition of claim 34, wherein the hMPV antigen is selected from the group consisting of hMPV nucleoprotein, hMPV phosphoprotein, hMPV matrix protein, hMPV small hydrophobic protein, hMPV RNA-dependent RNA polymerase, hMPV F protein, and hMPV G protein.

47. The pharmaceutical composition of claim 34, wherein the hMPV antigen is hMPV F protein.

48. The pharmaceutical composition of claim 34, wherein the first antibody is Palivizumab; AFFF; P12f2 P12f4; P11d4; Ale9; A12a6; A13c4; A17d4; A4B4; 1X-493L1; FR H3-3F4; M3H9; Y10H6; DG; AFFF(1); 6H8; L1-7E5; L2-15B10; A13a11; A1h5; A4B4(1);A4B4-F52S; or A4B4L1FR-S28R.

49. A pharmaceutical composition, said composition comprising: one or more antibodies or antigen-binding fragments thereof, wherein one or more of said antibodies or antigen-binding fragments thereof (i) are human or humanized, (ii) cross-react with a turkey APV antigen, and (iii) bind immunospecifically to a hMPV antigen.

50. A method of preventing a viral infection in a subject, said method comprising administering to the subject:
(i) a prophylactically effective amount of one or more first antibodies or antigen-binding fragments thereof, wherein one or more of said first antibodies or antigen-binding fragments thereof bind immunospecifically to a PIV antigen; and
(ii) a prophylactically effective amount of one or more second antibodies or antigen-binding fragments thereof, wherein one or more of said second antibodies or antigen-binding fragments thereof bind immunospecifically to a hMPV antigen.

51. The method of claim 50, wherein one or more of said first antibodies or antigen-binding fragments thereof neutralize PIV.

52. The method of claim 50, wherein one or more of said second antibodies or antigen-binding fragments thereof neutralize hMPV.

53. The method of claim 50, wherein one or more of said first antibodies or antigen-binding fragments thereof block PIV infection of cells of the subject.

54. The method of claim 50, wherein one or more of said second antibodies or antigen-binding fragments thereof block hMPV infection of cells of the subject.

55. A method of treating one or more symptoms of a respiratory viral infection in a subject, said method comprising administering to the subject:
(i) a therapeutically effective amount of one or more first antibodies or antigen-binding fragments thereof, wherein one or more of said first antibodies or antigen-binding fragments thereof bind immunospecifically to a PIV antigen; and
(ii) a therapeutically effective amount of one or more second antibodies or antigen-binding fragments thereof, wherein one or more of said second antibodies or antigen-binding fragments thereof bind immunospecifically to a hMPV antigen.

56. A method of passive immunotherapy, said method comprising administering to a subject:
(i) a first dose of one or more first antibodies or antigen-binding fragments thereof, wherein one or more of said first antibodies or a fragments thereof bind immunospecifically to a PIV antigen; and
(ii) a second dose of one or more second antibodies or antigen-binding fragments thereof, wherein one or more of said second antibodies or a fragments thereof bind immunospecifically to a hMPV antigen,
wherein the first dose reduces the incidence of PIV infection by at least 25% and wherein the second dose reduces the incidence of hMPV infection by at least 25%.

57. A method of passive immunotherapy, said method comprising administering to a subject:
(i) a first dose of one or more first antibodies or antigen-binding fragments thereof, wherein one or more of said first antibodies or antigen-binding fragments thereof bind immunospecifically to a PIV antigen; and
(ii) a second dose of one or more second antibodies or antigen-binding fragments thereof, wherein one or more of said second antibodies or antigen-binding fragments thereof bind immunospecifically to a hMPV antigen,
wherein the serum titer of one or more of said first antibodies or antigen-binding fragments thereof in the subject is at least 10 μg/ml after 15 days of administering one or more of said first antibodies or antigen-binding fragments thereof and wherein the serum titer of one or more of said second antibodies or antigen-binding fragments thereof in the subject is at least 10 μg/ml after 15 days of administering one or more of said second antibodies or antigen-binding fragments thereof.

58. The method of claim 50, 55, 56, or 57, wherein the amino acid sequence of the PIV antigen is that of SEQ ID NO:407 to 419, respectively.

59. The method of claim 50, 55, 56, or 57, wherein the amino acid sequence of the PIV antigen is 90% identical to the amino acid sequence of PIV nucleocapsid phosphoprotein, PIV L protein, PIV matrix protein, PIV HN glycoprotein, PIV RNA-dependent RNA polymerase, PIV Y1 protein, PIV D protein, or PIV C protein.

60. The method of claim 50, 55, 56, or 57, wherein the PIV antigen is selected from the group consisting of PIV nucleocapsid phosphoprotein, PIV L protein, PIV matrix protein, PIV HN glycoprotein, PIV RNA-dependent RNA polymerase, PIV Y1 protein, PIV D protein, or PIV C protein.

61. The method of claim 50, 55, 56, or 57, wherein one or more of said first antibodies immunospecifically bind to an antigen of human PIV type 1, human PIV type 2, human PIV type 3, or human PIV type 4.

62. The method of claim 50, 55, 56, or 57, wherein the PUV antigen is PIV F protein.

63. The method of claim 50, 55, 56, or 57, wherein one or more of said second antibodies cross-react with a turkey APV antigen.

64. The method of claim 50, 55, 56, or 57, wherein one or more of said second antibodies are (i) human or humanized antibodies and (ii) cross-react with a turkey APV antigen.

65. The method of claim 63, or 64, wherein said turkey APV antigen is selected from the group consisting of turkey APV nucleoprotein, turkey APV phosphoprotein, turkey APV matrix protein, turkey APV small hydrophobic protein, turkey APV RNA-dependent RNA polymerase, turkey APV F protein, and turkey APV G protein.

66. The method of claim 63, 64, wherein said turkey APV antigen is an antigen of avian pneumovirus type A, avian pneumovirus type B, or avian pneumovirus type C.

67. The method of claim 63, or 64, wherein the amino acid sequence of said turkey APV antigen is that of SEQ ID NO:424 to 429, respectively.

68. The method of claim 50, 55, 56, or 57, wherein the amino acid sequence of the hMPV antigen is that of SEQ ID NO: 399-406, 420, or 421, respectively.

69. The method of claim 50, 55, 56, or 57, wherein the hMPV antigen is selected from the group consisting of hMPV nucleoprotein, hMPV phosphoprotein, hMPV matrix protein, hMPV small hydrophobic protein, hMPV RNA-dependent RNA polymerase, hMPV F protein, and hMPV G protein.

70. The method of claim 50, 55, 56, or 57, wherein the hMPV antigen is hMPV F protein.

71. The method of claim 50 or 107, wherein the viral infection is an infection with PIV and hMPV or an infection with PIV and APV.

72. A method of preventing a viral infection in a subject, said method comprising administering to the subject:
(i) a prophylactically effective amount of one or more first antibodies or antigen-binding fragments thereof, wherein one or more of said first antibodies or antigen-binding fragments thereof bind immunospecifically to a RSV antigen;
(ii) a prophylactically effective amount of one or more second antibodies or antigen-binding fragments thereof, wherein one or more of said second antibodies or antigen-binding fragments thereof bind immunospecifically to a hMPV antigen; and
(iii) a prophylactically effective amount of one or more third antibodies or antigen-binding fragments thereof, wherein one or more of said third antibodies or antigen-binding fragments thereof bind immunospecifically to a PIV antigen.

73. The method of claim 72, wherein one or more of said first antibodies or antigen-binding fragments thereof neutralize RSV.

74. The method of claim 72, wherein one or more of said second antibodies or antigen-binding fragments thereof neutralize hMPV.

75. The method of claim 72, wherein one or more of said third antibodies or antigen-binding fragments thereof neutralize PIV.

76. The method of claim 72, wherein one or more of said first antibodies or antigen-binding fragments thereof block RSV infection of cells of the subject.

77. The method of claim 72, wherein one or more of said second antibodies or antigen-binding fragments thereof block hMPV infection of cells of the subject.

78. The method of claim 72, wherein one or more of said third antibodies or antigen-binding fragments thereof block PIV infection of cells of the subject.

79. A method of treating one or more symptoms of a respiratory viral infection in a subject, said method comprising administering to the subject:
(i) a therapeutically effective amount of one or more first antibodies or antigen-binding fragments thereof, wherein one or more of said first antibodies or antigen-binding fragments thereof bind immunospecifically to a RSV antigen;
(ii) a therapeutically effective amount of one or more second antibodies or antigen-binding fragments thereof, wherein one or more of said second antibodies or antigen-binding fragments thereof bind immunospecifically to a hMPV antigen; and
(iii) a therapeutically effective amount of one or more third antibodies or antigen-binding fragments thereof, wherein one or more of said third antibodies or antigen-binding fragments thereof bind immunospecifically to a PIV antigen.

80. A method of passive immunotherapy, said method comprising administering to a subject:
(i) a first dose of one or more first antibodies or antigen-binding fragments thereof, wherein one or more of said first antibodies or a fragments thereof bind immunospecifically to a RSV antigen;
(ii) a second dose of one or more second antibodies or antigen-binding fragments thereof, wherein one or more of said second antibodies or a fragments thereof bind immunospecifically to a hMPV antigen; and
(iii) a third dose of one or more third antibodies or antigen-binding fragments thereof, wherein one or more of said third antibodies or antigen-binding fragments thereof bind immunospecifically to a PIV antigen.
wherein the first dose reduces the incidence of RSV infection by at least 25%, wherein the second dose reduces the incidence of hMPV infection by at least 25%, and wherein the third dose reduces the incidence of PIV infection by at least 25%.

81. A method of passive immunotherapy, said method comprising administering to a subject:
(i) a first dose of one or more first antibodies or antigen-binding fragments thereof, wherein one or more of said first antibodies or antigen-binding fragments thereof bind immunospecifically to a RSV antigen;
(ii) a second dose of one or more second antibodies or antigen-binding fragments thereof, wherein one or more of said second antibodies or antigen-binding fragments thereof bind immunospecifically to a hMPV antigen; and
(iii) a third dose of one or more third antibodies or antigen-binding fragments thereof, wherein one or more of said third antibodies or antigen-binding fragments thereof bind immunospecifically to a PW antigen,
wherein the serum titer of one or more of said first antibodies or antigen-binding fragments thereof in the subject is at least 10 μg/ml after 15 days of administering one or more of said first antibodies or antigen-binding fragments thereof, wherein the serum titer of one or more of said second antibodies or antigen-binding fragments thereof in the subject is at least 10 μg/ml after 15 days of administering one or more of said second antibodies or antigen-binding fragments thereof, and wherein the serum titer of one or more of said third antibodies or antigen-binding fragments thereof in the subject is at least 10 μg/ml after 15 days of administering one or more of said third antibodies or antigen-binding fragments thereof.

82. The method of claim 79, 80, or 81, wherein the amino acid sequence of the PIV antigen is that of SEQ ID NO:407 to 419, respectively.

83. The method of claim 79, 80, or 81, wherein the amino acid sequence of the PIV antigen is 90% identical to the amino acid sequence of PIV nucleoprotein, PIV phosphoprotein, PIV matrix protein, PIV small hydrophobic protein, PIV RNA-dependent RNA polymerase, PIV F protein, or PIV G protein.

84. The method of claim 79, 80, or 81, wherein the PIV antigen is selected from the group consisting of PIV nucleoprotein, PIV phosphoprotein, PIV matrix protein, PIV small hydrophobic protein, PIV RNA polymerase, PIV F protein, and PIV G protein.

The application's sequence listing, which the Patent Office published only in electronic form, follows.

SEQUENCE LISTING (437 sequences)

SEQ ID NO: 1 - DNA, 2507 bp, metapneumovirus
  CDS (1)...(2507): Human metapneumovirus isolate 00-1 matrix protein (M) and fusion protein (F) genes
atggagtcctacctagtagacacctatcaaggcattccttacacagcagctgttcaagttgatctaatagaaaaggacctgttacctgcaagcctaacaatatggttccctttgtttcaggccaacacaccaccagcagtgctgctcgatcagctaaaaaccctgacaataaccactctgtatgctgcatcacaaaatggtccaatactcaaagtgaatgcatcagcccaaggtgcagcaatgtctgtacttcccaaaaaatttgaagtcaatgcgactgtagcactcgatgaatatagcaaactggaatttgacaaactcacagtctgtgaagtaaaaacagtttacttaacaaccatgaaaccatacgggatggtatcaaaatttgtgagctcagccaaatcagttggcaaaaaaacacatgatctaatcgcactatgtgattttatggatctagaaaagaacacacctgttacaataccagcattcatcaaatcagtttcaatcaaagagagtgagtcagctactgttgaagctgctataagcagtgaagcagaccaagctctaacacaggccaaaattgcaccttatgcgggattaattatgatcatgactatgaacaatcccaaaggcatattcaaaaagcttggagctgggactcaagtcatagtagaactaggagcatatgtccaggctgaaagcataagcaaaatatgcaagacttggagccatcaagggacaagatatgtcttgaagtccagataacaaccaagcaccttggccaagagctactaaccctatctcatagatcataaagtcaccattctagttatataaaaatcaagttagaacaagaattaaatcaatcaagaacgggacaaataaaaatgtcttggaaagtggtgatcattttttcattgttaataacacctcaacacggtcttaaagagagctacttagaagagtcatgtagcactataactgaaggatatctcagtgttctgaggacaggttggtacaccaatgtttttacactggaggtaggcgatgtagagaaccttacatgtgccgatggacccagcttaataaaaacagaattagacctgaccaaaagtgcactaagagagctcagaacagtttctgctgatcaactggcaagagaggagcaaattgaaaatcccagacaatctagattcgttctaggagcaatagcactcggtgttgcaactgcagctgcagttacagcaggtgttgcaattgccaaaaccatccggcttgaaagtgaagtaacagcaattaagaatgccctcaaaaagaccaatgaagcagtatctacattggggaatggagttcgtgtgttggcaactgcagtgagagagctgaaagattttgtgagcaagaatctaacacgtgcaatcaacaaaaacaagtgcgacattgctgacctgaaaatggccgttagcttcagtcaattcaacagaaggttcctaaatgttgtgcggcaattttcagacaacgctggaataacaccagcaatatctttggacttaatgacagatgctgaactagccagagctgtttccaacatgccaacatctgcaggacaaataaaactgatgttggagaaccgtgcaatggtaagaagaaaagggttcggattcctgataggagtttacggaagctccgtaatttacatggtgcaactgccaatctttggggttatagacacgccttgctggatagtaaaagcagccccttcttgttcaggaaaaaagggaaactatgcttgcctcttaagagaagaccaaggatggtattgtcaaaatgcagggtcaactgtttactacccaaatgaaaaagactgtgaaacaagaggagaccatgtcttttgcgacacagcagcaggaatcaatgttgctgagcagtcaaaggagtgcaacataaacatatctactactaattacccatgcaaagttagcacaggaagacatcctatcagtatggttgcactatctcctcttggggctttggttgcttgctacaagggagtgagctgttccattggcagcaacagagtagggatcatcaagcaactgaacaaaggctgctcttatataaccaaccaagacgcagacacagtgacaatagacaacactgtataccagctaagcaaagttgaaggcgaacagcatgttataaaaggaaggccagtgtcaagcagctttgacccagtcaagtttcctgaagatcaattcaatgttgcacttgaccaagttttcgagagcattgagaacagtcaggccttggtggatcaatcaaacagaatcctaagcagtgcagagaaaggaaacactggcttcatcattgtaataattctaattgctgtccttggctctaccatgatcctagtgagtgtttttatcataataaagaaaacaaagagacccacaggagcacctccagagctgagtggtgtcacaaacaatggcttcataccacataattag

SEQ ID NO: 2 - DNA, 1596 bp, pneumvirus
  CDS (1)...(1596): Avian pneumovirus fusion protein gene, partial cds
atgtcttggaaagtggtactgctattggtattgctagctaccccaacgggggggctagaagaaagttatctagaggagtcatgcagtactgttactagaggatacctgagtgttttgaggacaggatggtatacaaatgtgttcacacttggggttggagatgtgaaaaatctcacatgtaccgacgggcccagcttaataagaacagaacttgaactgacaaaaaatgcacttgaggaactcaagacagtatcagcagatcaattggcaaaggaagctaggataatgtcaccaagaaaagcccggtttgttctgggtgccatagcattaggtgtggcaactgctgctgctgtgacggctggtgtagcgatagccaagacaattaggctagaaggagaagtggctgcaatcaaaggtgcgctcaggaaaacaaatgaggctgtatctacattaggaaatggcgtgagggtacttgcaacagctgtgaatgatctcaaggactttataagtaaaaaattgacacctgcaataaacaggaacaagtgtgacatctcagaccttaagatggcagtgagctttggacaatacaatcggaggttcctcaatgtggtaagacagttttctgacaatgcaggtattacgcctgcaatatctctagatttaatgactgacgctgagcttgtaagagctgtaagcaacatgcccacatcttcaggacagatcaatctgatgcttgagaatcgggcaatggtcagaaggaaaggatttgggattttgattggagtttatggtagctctgtggtctatatagtgcagcttcctattttcggtgtgatagatacaccgtgttggagggtgaaggctgctccattatgttcagggaaagacgggaattatgcatgtctcttgcgagaggaccaaggttggtattgtcaaaatgctggatccacagtttattatccaaatgaggaggactgtgaagtaagaagtgatcatgtgttttgtgacacagcagctgggataaatgtagcaaaggagtcagaagagtgcaacaggaatatctcaacaacaaagtacccttgcaaggtaagtacagggcgtcacccaataagcatggtggccttatcaccactgggtgctttggtagcctgttatgacggtatgagttgttccattggaagcaacaaggttggaataatcagacctttggggaaagggtgttcatacatcagcaatcaagatgctgacactgttacaattgacaacacagtgtaccaattgagcaaagttgaaggagaacaacacacaattaaagggaagccagtatctagcaattttgaccctatagagttccctgaagatcagttcaacgtagccctggatcaggtgtttgaaagtgttgagaagagtcagaatctgatagaccagtcaaacaagatattggatagcattgaaaaggggaatgcaggatttgtcatagtgatagtcctcattgtcctgctcatgctggcagcagttggtgtgggtgtcttctttgtggttaagaagagaaaagctgctcccaaattcccaatggaaatgaatggtgtgaacaac

SEQ ID NO: 3 - DNA, 1666 bp, pneumovirus
  CDS (14)...(1627): Avian pneumovirus isolate 1b fusion protein mRNA, complete cds
gggacaagtgaaaatgtcttggaaagtggtactgctattggtattgctagctaccccaacgggggggctagaagaaagttatctagaggagtcatgcagtactgttactagaggatacctgagtgttttgaggacaggatggtatacaaatgtgttcacacttgaggttggagatgtggaaaatctcacatgtaccgacgggcccagcttaataagaacagaacttgaactgacaaaaaatgcacttgaggaactcaagacagtatcagcagatcaattggcaaaggaagctaggataatgtcaccaagaaaagcccggtttgttctgggtgccatagcattaggtgtggcaactgctgctgctgtgacggctggtgtagcgatagccaagacaattaggctagaaggagaagtggctgcaatcaagggtgcgctcaggaaaacaaatgaggctgtatctacattaggaaatggcgtgagggtacttgcaacagctgtgaatgatctcaaggactttataagtaaaaaattgacacctgcaataaacaggaacaagtgtgacatctcagaccttaagatggcagtgagctttggacaatacaatcggaggttcctcaatgtggtaagacagttttctgacaatgcaggtattacgcctgcaatatctctagatttaatgactgacgctgagcttgtaagagctgtaagcaacatgcccacatcttcaggacagatcaatctgatgcttgagaatcgggcaatggtcagaaggaaaggatttgggattttgattggagtttatggtagctctgtggtctatatagtgcagcttcctattttcggtgtgatagatacaccgtgttggaaggtgaaggctgctccattatgttcagggaaagacgggaattatgcatgtctcttgcgagaggaccaaggttggtattgtcaaaatgctggatccacagtttattatccaaatgaggaggactgtgaagtaagaagtgatcatgtgttttgtgacacagcagctgggataaatgtagcaaaggagtcagaagagtgcaacaggaatatctcaacaacaaagtacccttgcaaggtaagtacagggcgtcacccaataagcatggtggccttatcaccactgggtgctttggtagcctgttatgacggtatgagttgttccattggaagcaacaaggttggaataatcagacctttggggaaagggtgttcatacatcagcaatcaagatgctgacactgttacaattgacaacacagtgtaccaattgagcaaagttgaaggagaacaacacacaattaaagggaagccagtatctagcaattttgaccctatagagttccctgaagatcagttcaacgtagccctggatcaggtgtttgaaagtgttgagaagagtcagaatctgatagaccagtcaaacaagatattggatagcattgaaaaggggaatgcaggatttgtcatagtgatagtcctcattgtcctgctcatgctggcagcagttggtgtgggtgtcttctttgtggttaagaagagaaaagctgctcccaaattcccaatggaaatgaatggtgtgaacaacaaaggatttatcccttaattttagttattaaaaaaaaaaaaaaaaaaaaaaaaaaaa

SEQ ID NO: 4 - DNA, 1636 bp, rhinotracheitis virus
  CDS (13)...(1629): Turkey rhinotracheitis virus gene for fusion protein (F1 and F2 subunits), complete cds
gggacaagtaggatggatgtaagaatctgtctcctattgttccttatatctaatcctagtagctgcatacaagaaacatacaatgaagaatcctgcagtactgtaactagaggttataagagtgtgttaaggacagggtggtatacgaatgtatttaacctcgaaatagggaatgttgagaacatcacttgcaatgatggacccagcctaattgacactgagttagtactcacaaagaatgctttgagggagctcaaaacagtgtcagctgatcaagtggctaaggaaagcagactatcctcacccaggagacgtagatttgtactgggtgcaatagcacttggtgttgcgacagctgctgccgtaacagctggtgtagcacttgcaaagacaattagattagagggagaggtgaaggcaattaagaatgccctccggaacacaaatgaggcagtatccacattagggaatggtgtgagggtactagcaactgcagtcaatgacctcaaagaatttataagtaaaaaattgactcctgctattaaccagaacaaatgcaatatagcagatataaagatggcaattagttttggccaaaataacagaaggttcctgaatgtggtgaggcaattctctgatagtgcaggtatcacatcagctgtgtctcttgatttaatgacagatgatgaacttgttagagcaattaacagaatgccaacttcatcaggacagattagtttgatgttgaacaatcgtgccatggttagaaggaaggggtttggtatattgattggtgtttatgatggaacggtcgtttatatggtacaactgcccatattcggcgtgattgagacaccttgttggagggtggtggcagcaccactctgtaggaaagagaaaggcaattatgcttgtatactgagagaagatcaagggtggtactgtacaaatgctggctctacagcttattatcctaataaagatgattgtgaggtaagggatgattatgtattttgtgacacagcagctggcattaatgtggccctagaagttgaacagtgcaactataacatatcgacttctaaatacccatgcaaagtcagcacaggtagacaccctgtcagtatggtagccttaacccccctagggggtctagtgtcttgttatgagagtgtaagttgctccataggtagcaataaagtagggataataaaacagctaggcaaagggtgcacccacattcccaacaacgaagctgacacgataaccattgataacactgtgtaccaattgagcaaggttgtaggcgaacagaggaccataaaaggagctccagttgtgaacaattttaacccaatattattccctgaggatcagttcaatgttgcacttgaccaagtatttgagagtatagatagatctcaggacttaatagataagtctaacgacttgctaggtgcagatgccaagagcaaggctggaattgctatagcaatagtagtgctagtcattctaggaatcttctttttacttgcagtgatatattactgttccagagtccggaagaccaaaccaaagcatgattacccggccacgacaggtcatagcagcatggcttatgtcagttaagttattt

SEQ ID NO: 5 - DNA, 1860 bp, pneumovirus
  CDS (1)...(110): Avian pneumovirus matrix protein (M) gene, partial cds
  CDS (216)...(1829): Avian pneumovirus fusion glycoprotein (F) gene, complete cds
gagttcaggtaatagtggagttaggggcatacgttcaagcagaaagcataagcagaatctgcaggaactggagccaccagggtacgagatatgtcctgaagtcaagataaacacagagagtacacttaccaaatcacagtaacaatttcgtttttaaccctctcatagttattacctagcttgatattatttagaaaaaattgggacaagtgaaaatgtcttggaaagtggtactgctattggtattgctagctaccccaacgggggggctagaagaaagttatctagaggagtcatgcagtactgttactagaggatacctgagtgttttgaggacaggatggtatacaaatgtgttcacacttgaggttggagatgtggaaaatctcacatgtaccgacgggcccagcttaataagaacagaacttgaactgacaaaaaatgcacttgaggaactcaagacagtatcagcagatcaattggcaaaggaagctaggataatgtcaccaagaaaagcccggtttgttctgggtgccatagcattaggtgtggcaactgctgctgctgtgacggctggtgtagcgatagccaagacaattaggctagaaggagaagtggctgcaatcaagggtgcgctcaggaaaacaaatgaggctgtatctacattaggaaatggcgtgagggtacttgcaacagctgtgaatgatctcaaggactttataagtaaaaaattgacacctgcaataaacaggaacaagtgtgacatctcagaccttaagatggcagtgagctttggacaatacaatcggaggttcctcaatgtggtaagacagttttctgacaatgcaggtattacgcctgcaatatctctagatttaatgactgacgctgagcttgtaagagctgtaagcaacatgcccacatcttcaggacagatcaatctgatgcttgagaatcgggcaatggtcagaaggaaaggatttgggattttgattggagtttatggtagctctgtggtctatatagtgcagcttcctattttcggtgtgatagatacaccgtgttggaaggtgaaggctgctccattatgttcagggaaagacgggaattatgcatgtctcttgcgagaggaccaaggttggtattgtcaaaatgctggatccacagtttattatccaaatgaggaggactgtgaagtaagaagtgatcatgtgttttgtgacacagcagctgggataaatgtagcaaaggagtcagaagagtgcaacaggaatatctcaacaacaaagtacccttgcaaggtaagtacagggcgtcacccaataagcatggtggccttatcaccactgggtgctttggtagcctgttatgacggtatgagttgttccattggaagcaacaaggttggaataatcagacctttggggaaagggtgttcatacatcagcaatcaagatgctgacactgttacaattgacaacacagtgtaccaattgagcaaagttgaaggagaacaacacacaattaaagggaagccagtatctagcaattttgaccctatagagttccctgaagatcagttcaacatagccctggatcaggtgtttgaaagtgttgagaagagtcagaatctgatagaccagtcaaacaagatattggatagcattgaaaaggggaatgcaggatttgtcatagtgatagtcctcattgtcctgctcatgctggcagcagttggtgtgggtgtcttctttgtggttaagaagagaaaagctgctcccaaattcccaatggaaatgaatggtgtgaacaacaaaggatttatcccttaattttagttactaaaaaattgggacaagtgaa

SEQ ID NO: 6 - protein, 574 aa, paramyxovirus
  paramyxovirus F protein hRSV B
MELLIHRLSAIFLTLAINALYLTSSQNITEEFYQSTCSAVSRGYFSALRTGWYTSVITIELSNIKETKCNGTDTKVKLIKQELDKYKNAVTELQLLMQNTPAANNRARREAPQYMNYTINTTKNLNVSISKKRKRRFLGFLLGVGSAIASGIAVSKVLHLEGEVNKIKNALLSTNKAVVSLSNGVSVLTSKVLDLKNYINNQLLPIVNQQSCRISNIETVIEFQQKNSRLLEINREFSVNAGVTTPLSTYMLTNSELLSLINDMPITNDQKKLMSSNVQIVRQQSYSIMSIIKEEVLAYVVQLPIYGVIDTPCWKLHTSPLCTTNIKEGSNICLTRTDRGWYCDNAGSVSFFPQADTCKVQSNRVFCDTMNSLTLPSEVSLCNTDIFNSKYDCKIMTSKTDISSSVITSLGAIVSCYGKTKCTASNKNRGIIKTFSNGCDYVSNKGVDTVSVGNTLYYVNKLEGKNLYVKGEPIINYYDPLVFPSDEFDASISQVNEKINQSLAFIRRSDELLHNVNTGKSTTNIMITTIIIVIIVVLLSLIAIGLLLYCKAKNTPVTLSKDQLSGINNIAFSK

SEQ ID NO: 7 - protein, 574 aa, paramyxovirus
  paramyxovirus F protein hRSV A2
MELLILKANAITTILTAVTFCFASGQNITEEFYQSTCSAVSKGYLSALRTGWYTSVITIELSNIKENKCNGTDAKVKLIKQELDKYKNAVTELQLLMQSTPPTNNRARRELPRFMNYTLNNAKKTNVTLSKKRKRRFLGFLLGVGSAIASGVAVSKVLHLEGEVNKIKSALLSTNKAVVSLSNGVSVLTSKVLDLKNYIDKQLLPIVNKQSCSISNIETVIEFQQKNNRLLEITREFSVNAGVTTPVSTYMLTNSELLSLINDMPITNDQKKLMSNNVQIVRQQSYSIMSIIKEEVLAYVVQLPLYGVIDTPCWKLHTSPLCTTNTKEGSNICLTRTDRGWYCDNAGSVSFFPQAETCKVQSNRVFCDTMNSLTLPSEINLCNVDIFNPKYDCKIMTSKTDVSSSVITSLGAIVSCYGKTKCTASNKNRGIIKTFSNGCDYVSNKGMDTVSVGNTLYYVNKQEGKSLYVKGEPIINFYDPLVFPSDEFDASISQVNEKINQSLAFIRKSDELLHNVNAGKSTTNIMITTIIIVIIVILLSLIAVGLLLYCKARSTPVTLSKDQLSGINNIAFSN

SEQ ID NO: 8 - protein, 121 aa, metapneumovirus
  human metapneumovirus01-71 (partial sequence)
LLITPQHGLKESYLEESCSTITEGYLSVLRTGWYTNVFTLEVGDVENLTCADGPSLIKTELDLTKSALRELRTVSADQLAREEQIENPRQSRFVLGAIALGVATAAAVTAGVAIAKTIRLE

SEQ ID NO: 9 - protein, 539 aa, metapneumovirus
  Human metapneumovirus isolate 00-1 matrix protein (M) and fusion protein (F) genes
MSWKVVIIFSLLITPQHGLKESYLEESCSTITEGYLSVLRTGWYTNVFTLEVGDVENLTCADGPSLIKTELDLTKSALRELRTVSADQLAREEQIENPRQSRFVLGAIALGVATAAAVTAGVAIAKTIRLESEVTAIKNALKKTNEAVSTLGNGVRVLATAVRELKDFVSKNLTRAINKNKCDIADLKMAVSFSQFNRRFLNVVRQFSDNAGITPAISLDLMTDAELARAVSNMPTSAGQIKLMLENRAMVRRKGFGFLIGVYGSSVIYMVQLPIFGVIDTPCWIVKAAPSCSGKKGNYACLLREDQGWYCQNAGSTVYYPNEKDCETRGDHVFCDTAAGINVAEQSKECNINISTTNYPCKVSTGRHPISMVALSPLGALVACYKGVSCSIGSNRVGIIKQLNKGCSYITNQDADTVTIDNTVYQLSKVEGEQHVIKGRPVSSSFDPVKFPEDQFNVALDQVFESIENSQALVDQSNRILSSAEKGNTGFIIVIILIAVLGSTMILVSVFIIIKKTKRPTGAPPELSGVTNNGFIPHN

SEQ ID NO: 10 - protein, 532 aa, Avian pneumovirus
  Avian pneumovirus fusion protein gene, partial cds
MSWKVVLLLVLLATPTGGLEESYLEESCSTVTRGYLSVLRTGWYTNVFTLGVGDVKNLTCTDGPSLIRTELELTKNALEELKTVSADQLAKEARIMSPRKARFVLGAIALGVATAAAVTAGVAIAKTIRLEGEVAAIKGALRKTNEAVSTLGNGVRVLATAVNDLKDFISKKLTPAINRNKCDISDLKMAVSFGQYNRRFLNVVRQFSDNAGITPAISLDLMTDAELVRAVSNMPTSSGQINLMLENRAMVRRKGFGILIGVYGSSVVYIVQLPIFGVIDTPCWRVKAAPLCSGKDGNYACLLREDQGWYCQNAGSTVYYPNEEDCEVRSDHVFCDTAAGINVAKESEECNRNISTTKYPCKVSTGRHPISMVALSPLGALVACYDGMSCSIGSNKVGIIRPLGKGCSYISNQDADTVTIDNTVYQLSKVEGEQHTIKGKPVSSNFDPIEFPEDQFNVALDQVFESVEKSQNLIDQSNKILDSIEKGNAGFVIVIVLIVLLMLAAVGVGVFFVVKKRKAAPKFPMEMNGVNN

SEQ ID NO: 11 - protein, 537 aa, Avian pneumovirus
  Avian pneumovirus isolate 1b fusion protein mRNA, complete cds
MSWKVVLLLVLLATPTGGLEESYLEESCSTVTRGYLSVLRTGWYTNVFTLEVGDVENLTCTDGPSLIRTELELTKNALEELKTVSADQLAKEARIMSPRKARFVLGAIALGVATAAAVTAGVAIAKTIRLEGEVAAIKGALRKTNEAVSTLGNGVRVLATAVNDLKDFISKKLTPAINRNKCDISDLKMAVSFGQYNRRFLNVVRQFSDNAGITPAISLDLMTDAELVRAVSNMPTSSGQINLMLENRAMVRRKGFGILIGVYGSSVVYIVQLPIFGVIDTPCWKVKAAPLCSGKDGNYACLLREDQGWYCQNAGSTVYYPNEEDCEVRSDHVFCDTAAGINVAKESEECNRNISTTKYPCKVSTGRHPISMVALSPLGALVACYDGMSCSIGSNKVGIIRPLGKGCSYISNQDADTVTIDNTVYQLSKVEGEQHTIKGKPVSSNFDPIEFPEDQFNVALDQVFESVEKSQNLIDQSNKILDSIEKGNAGFVIVIVLIVLLMLAAVGVGVFFVVKKRKAAPKFPMEMNGVNNKGFIP

SEQ ID NO: 12 - protein, 538 aa, Turkey rhinotracheitis virus
  Turkey rhinotracheitis virus gene for fusion protein (F1 and F2 subunits), complete cds
MDVRICLLLFLISNPSSCIQETYNEESCSTVTRGYKSVLRTGWYTNVFNLEIGNVENITCNDGPSLIDTELVLTKNALRELKTVSADQVAKESRLSSPRRRRFVLGAIALGVATAAAVTAGVALAKTIRLEGEVKAIKNALRNTNEAVSTLGNGVRVLATAVNDLKEFISKKLTPAINQNKCNIADIKMAISFGQNNRRFLNVVRQFSDSAGITSAVSLDLMTDDELVRAINRMPTSSGQISLMLNNRAMVRRKGFGILIGVYDGTVVYMVQLPIFGVIETPCWRVVAAPLCRKEKGNYACILREDQGWYCTNAGSTAYYPNKDDCEVRDDYVFCDTAAGINVALEVEQCNYNISTSKYPCKVSTGRHPVSMVALTPLGGLVSCYESVSCSIGSNKVGIIKQLGKGCTHIPNNEADTITIDNTVYQLSKVVGEQRTIKGAPVVNNFNPILFPEDQFNVALDQVFESIDRSQDLIDKSNDLLGADAKSKAGIAIAIVVLVILGIFFLLAVIYYCSRVRKTKPKHDYPATTGHSSMAYVS

SEQ ID NO: 13 - protein, 537 aa, Avian penumovirus
  Avian pneumovirus fusion glycoprotein (F) gene, complete cds
MSWKVVLLLVLLATPTGGLEESYLEESCSTVTRGYLSVLRTGWYTNVFTLEVGDVENLTCTDGPSLIRTELELTKNALEELKTVSADQLAKEARIMSPRKARFVLGAIALGVATAAAVTAGVAIAKTIRLEGEVAAIKGALRKTNEAVSTLGNGVRVLATAVNDLKDFISKKLTPAINRNKCDISDLKMAVSFGQYNRRFLNVVRQFSDNAGITPAISLDLMTDAELVRAVSNMPTSSGQINLMLENRAMVRRKGFGILIGVYGSSVVYIVQLPIFGVIDTPCWKVKAAPLCSGKDGNYACLLREDQGWYCQNAGSTVYYPNEEDCEVRSDHVFCDTAAGINVAKESEECNRNISTTKYPCKVSTGRHPISMVALSPLGALVACYDGMSCSIGSNKVGIIRPLGKGCSYISNQDADTVTIDNTVYQLSKVEGEQHTIKGKPVSSNFDPIEFPEDQFNIALDQVFESVEKSQNLIDQSNKILDSIEKGNAGFVIVIVLIVLLMLAAVGVGVFFVVKKRKAAPKFPMEMNGVNNKGFIP

SEQ ID NO: 14 - DNA, 1193 bp, rhinotracheitis virus
  CDS (16)...(1191): Turkey rhinotracheitis virus (strain CVL14/1) attachment protien (G) mRNA, complete cds
gggacaagtatctctatggggtccaaactatatatggctcagggcaccagtgcatatcaaactgcagtggggttctggctggacatcgggaggaggtacatattggctatagtcctatcagctttcgggctgacctgcacagtcactattgcactcactgttagcgtcatagttgaacagtcagtgttagaggagtgcagaaactacaatggaggagatagagattggtggtcaaccacccaggagcagccaactactgcaccaagtgcgactccagcaggaaattatggaggattacaaacggctcgaacaagaaagtctgaaagctgtttgcatgtgcaaatttcttatggtgatatgtatagccgcagtgatactgtactgggtggttttgattgtatgggcttattggttctttgcaaatcaggaccaatttgtcagcgagataatcaagttgacccaacagccctctgccattgcagggtagatctttcaagtgtggactgctgcaaggtgaacaagattagcactaacagcagcaccacctctgagccccagaagaccaacccggcatggcctagccaagacaacacagactccgatccaaatccccaaggcataaccaccagcacagccactctgctctcaacaagtctgggcctcatgctcacatcgaagactgggacacacaaatcagggcccccccaagccttgccggggagcaacaccaacggaaaaacaaccacagaccgagaaccagggcccacaaaccaaccaaattcaaccaccaatgggcaacacaataaacacacccaacgaatgacacccccgccaagtcacgacaacacaagaaccatcctccagcacacaacaccctgggaaaagacattcagtacatacaagcccacacactctccgaccaacgaatcagatcaatccctccccacaactcaaaacagcatcaactgtgaacattttgacccccaaggcaaggaaaaaatctgctacagagtaggttcttacaactccaatattacaaagcaatgcagaattgatgtgcctttgtgttccacttatagcacagtgtgcatgaaaacatactataccgaaccattcaactgttggaggcgtatctggcgttgcttgtgtgatgacggagttggtctggttgagtggtgttgcactagttaact

SEQ ID NO: 15 - DNA, 1260 bp, rhinotracheitis virus
  CDS (16)...(1260): Turkey rhinotracheitis virus (strain 6574) attachment protein (G), complete cds
gggacaagtatccagatggggtcagagctctacatcatagagggggtgagctcatctgaaatagtcctcaagcaagtcctcagaaggagccaaaaaatactgttaggactggtgttatcagccttaggcttgacgctcactagcactattgttatatctatttgtattagtgtagaacaggtcaaattacgacagtgtgtggacacttattgggcggaaaatggatccttacatccaggacagtcaacagaaaatacttcaacaagaggtaagactacaacaaaagaccctagaagattacaggcgactggagcaggaaagtttgagagctgtgggtatgtgcaagttgttgatggtgatatgcatgatcgcagttatgctgtactgggtggtgttgattgtttgggcttattggctctttgtgaatcaggaccaatttgtcagggagatacttggtctgaagacggaaacttctgccgatgcactttttcttcccatggggtgagttgctgcaaaaaacccaaaagcaaggcaaccactgcccagaggaactccaaaccagctaacagcaaatcaactcctccggtacattcagacagggccagcaaagaacataatccctcccaaggggagcaaccccgcagggggccaaccagcagcaagacaactattgctagcaccccttcaacagaggacactgctaaaccaacgattagcaaacctaaactcaccatcaggccctcgcaaagaggtccatccggcagcacaaaagcagcctccagcacccccagccacaagaccaacaccagaggcaccagcaagacgaccgaccagagaccccgcaccggacccactcccgaaaggcccagacaaacccacagcacagcaactccgccccccacaaccccaatccacaagggccgggccccaacccccaaaccaacaacagacctcaaggtcaacccaagggaaggcagcacaagcccaactgcaatacagaaaaacccaaccacacaaagtaatcttgttgactgcacactgtctgatccagatgagccacaaaggatttgttaccaggtaggaacttacaatcctagtcaatcgggaacctgcaacatagaggttccaaaatgttccacttatgggcatgcttgtatggctacattatatgacaccccattcaactgctggcgcaggaccaggagatgcatctgtgattccggaggggagctgattgagtggtgctgtactagtcaataa

SEQ ID NO: 16 - protein, 391 aa, Turkey rhinotracheitis virus
  Turkey rhinotracheitis virus (strain CVL14/1) attachment protien (G) mRNA, complete cds
MGSKLYMAQGTSAYQTAVGFWLDIGRRYILAIVLSAFGLTCTVTIALTVSVIVEQSVLEECRNYNGGDRDWWSTTQEQPTTAPSATPAGNYGGLQTARTRKSESCLHVQISYGDMYSRSDTVLGGFDCMGLLVLCKSGPICQRDNQVDPTALCHCRVDLSSVDCCKVNKISTNSSTTSEPQKTNPAWPSQDNTDSDPNPQGITTSTATLLSTSLGLMLTSKTGTHKSGPPQALPGSNTNGKTTTDREPGPTNQPNSTTNGQHNKHTQRMTPPPSHDNTRTILQHTTPWEKTFSTYKPTHSPTNESDQSLPTTQNSINCEHFDPQGKEKICYRVGSYNSNITKQCRIDVPLCSTYSTVCMKTYYTEPFNCWRRIWRCLCDDGVGLVEWCCTS

SEQ ID NO: 17 - protein, 414 aa, rhinotracheitis virus
  Turkey rhinotracheitis virus (strain 6574) attachment protein (G), complete cds
MGSELYIIEGVSSSEIVLKQVLRRSQKILLGLVLSALGLTLTSTIVISICISVEQVKLRQCVDTYWAENGSLHPGQSTENTSTRGKTTTKDPRRLQATGAGKFESCGYVQVVDGDMHDRSYAVLGGVDCLGLLALCESGPICQGDTWSEDGNFCRCTFSSHGVSCCKKPKSKATTAQRNSKPANSKSTPPVHSDRASKEHNPSQGEQPRRGPTSSKTTIASTPSTEDTAKPTISKPKLTIRPSQRGPSGSTKAASSTPSHKTNTRGTSKTTDQRPRTGPTPERPRQTHSTATPPPTTPIHKGRAPTPKPTTDLKVNPREGSTSPTAIQKNPTTQSNLVDCTLSDPDEPQRICYQVGTYNPSQSGTCNIEVPKCSTYGHACMATLYDTPFNCWRRTRRCICDSGGELIEWCCTSQ

SEQ ID NO: 18 - DNA, 13294 bp, human metapneumo virus
  misc_feature (0)...(0): human MPV protein
acgcgaaaaaaacgcgtataaattaaattccaaacaaaacgggacaaataaaaatgtctcttcaagggattcacctaagtgatctatcatataaacatgctatattaaaagagtctcaatacacaataaaaagagatgtaggcaccacaactgcagtgacaccttcatcattacaacaagaaataacacttttgtgtggggaaatactttacactaaacacactgattacaaatatgctgctgagataggaatacaatatatttgcacagctctaggatcagaaagagtacaacagattttgagaaactcaggtagtgaagttcaggtggttctaaccaaaacatactccttagggaaaggcaaaaacagtaaaggggaagagctgcagatgttagatatacatggagtggaaaagagttggatagaagaaatagacaaagaggcaagaaagacaatggtaactttgcttaaggaatcatcaggtaacatcccacaaaaccagagaccttcagcaccagacacaccaataattttattatgtgtaggtgccctaatattcactaaactagcatcaacaatagaagttggattagagactacagttagaagagctaatagagtgctaagtgatgcactcaaaagatacccaaggatagatataccaaagattgctagatctttttatgaactatttgaacaaaaagtgtactacagaagtttattcattgagtacggaaaagctttaggctcatcttcaacaggaagcaaagcagaaagtttgtttgtaaatatatttatgcaagcttatggagctggccaaacactgctaaggtggggtgtcattgccagatcatccaacaacataatgctagggcatgtatctgtgcaatctgaattgaagcaagttacagaggtttatgacttggtgagagaaatgggtcctgaatctgggcttttacatctaagacaaagtccaaaggcagggctgttatcattggccaattgccccaattttgctagtgttgttcttggcaatgcttcaggtctaggcataatcggaatgtacagagggagagtaccaaacacagagctattttctgcagcagaaagttatgccagaagcttaaaagaaagcaataaaatcaacttctcttcgttagggcttacagatgaagaaaaagaagctgcagaacacttcttaaacatgagtggtgacaatcaagatgattatgagtaattaaaaaactgggacaagtcaaaatgtcattccctgaaggaaaggatattctgttcatgggtaatgaagcagcaaaaatagccgaagctttccagaaatcactgaaaaaatcaggtcacaagagaactcaatctattgtaggggaaaaagttaacactatatcagaaactctagaactacctaccatcagcaaacctgcacgatcatctacactgctggaaccaaaattggcatgggcagacaacagcggaatcaccaaaatcacagaaaaaccagcaaccaaaacaacagatcctgttgaagaagaggaattcaatgaaaagaaagtgttaccttccagtgatgggaagactcctgcagagaaaaaatcaaagttttcaaccagtgtaaaaaagaaagtttcctttacatcaaatgaaccagggaaatacaccaaactagagaaagatgccctagatttgctctcagacaatgaggaagaagacgcagaatcctcaatcctaacttttgaggagaaagatacatcatcactaagcattgaagctagactagaatctatagaagagaagttgagcatgatattaggactgcttcgtacacttaacattgcaacagcaggaccaacagctgcacgagatggaattagggatgcaatgattggtataagagaagagctaatagcagagataattaaggaagccaagggaaaagcagctgaaatgatggaagaagagatgaatcaaagatcaaaaataggaaatggcagtgtaaaactaaccgagaaggcaaaagagctcaacaaaattgttgaagacgagagcacaagcggtgaatcagaagaagaagaagaaccaaaagaaactcaggataacaatcaaggagaagatatttatcagttaatcatgtagtttaataaaaataaacaatgggacaagtcaagatggagtcctatctagtagacacttatcaaggcattccatatacagctgctgttcaagttgacctggtagaaaaagatttactgccagcaagtttgacaatatggtttcctttatttcaggccaacacaccaccagcagttctgcttgatcagctaaaaaccctgacaataaccactctgtatgctgcatcacagaatggtccaatactcaaggtaaatgcatctgcccaaggtgctgccatgtctgtacttcccaaaaaattcgaggtaaatgcaactgtagcacttgatgaatacagtaaacttgattttgacaagctgacggtctgcgatgttaaaacagtttatttgacaactatgaaaccgtacgggatggtgtcaaaatttgtgagttcagccaaatcagttggcaaaaagacacatgatctaattgcactatgtgacttcatggacctagagaaaaatatacctgtgacaataccagcattcataaagtcagtttcaatcaaagagagtgaatcagccactgttgaagctgcaataagcagcgaagccgaccaagccttgacacaagccaagattgcgccctatgcaggactaattatgatcatgaccatgaacaatccaaaaggtatattcaagaaactaggggctggaacacaagtgatagtagagctgggggcatatgttcaggctgagagcatcagtaggatctgcaagagctggagtcaccaaggaacaagatacgtactaaaatccagataaaaataactgtcttaatcaataattgcttatataactctagagattaataagcttattattatagttatataaaaataaattagaattagaagggcatcaatagaaagcgggacaaataaaaatgtcttggaaagtgatgatcatcatttcgttactcataacaccccagcacgggctaaaggagagttatttggaagaatcatgtagtactataactgagggatacctcagtgttttaagaacaggctggtacactaatgtcttcacattagaagttggtgatgttgaaaatcttacatgtactgatggacctagcttaatcaaaacagaacttgatctaacaaaaagtgctttaagggaactcaaaacagtctctgctgatcagttggcgagagaggagcaaattgaaaatcccagacaatcaagatttgtcttaggtgcgatagctctcggagttgctacagcagcagcagtcacagcaggcattgcaatagccaaaaccataaggcttgagagtgaggtgaatgcaattaaaggtgctctcaaacaaactaatgaagcagtatccacattagggaatggtgtgcgggtcctagccactgcagtgagagagctaaaagaatttgtgagcaaaaacctgactagtgcaatcaacaggaacaaatgtgacattgctgatctgaagatggctgtcagcttcagtcaattcaacagaagatttctaaatgttgtgcggcagttttcagacaatgcagggataacaccagcaatatcattggacctgatgactgatgctgagttggccagagctgtatcatacatgccaacatctgcagggcagataaaactgatgttggagaaccgcgcaatggtaaggagaaaaggatttggaatcctgataggggtctacggaagctctgtgatttacatggttcaattgccgatctttggtgtcatagatacaccttgttggatcatcaaggcagctccctcttgctcagaaaaaaacgggaattatgcttgcctcctaagagaggatcaagggtggtattgtaaaaatgcaggatctactgtttactacccaaatgaaaaagactgcgaaacaagaggtgatcatgttttttgtgacacagcagcagggatcaatgttgctgagcaatcaagagaatgcaacatcaacatatctactaccaactacccatgcaaagtcagcacaggaagacaccctataagcatggttgcactatcacctctcggtgctttggtggcttgctataaaggggtaagctgctcgattggcagcaattgggttggaatcatcaaacaattacccaaaggctgctcatacataaccaaccaggatgcagacactgtaacaattgacaataccgtgtatcaactaagcaaagttgaaggtgaacagcatgtaataaaagggagaccagtttcaagcagttttgatccaatcaagtttcctgaggatcagttcaatgttgcgcttgatcaagtcttcgaaagcattgagaacagtcaggcactagtggaccagtcaaacaaaattctaaacagtgcagaaaaaggaaacactggtttcattatcgtagtaattttggttgctgttcttggtctaaccatgatttcagtgagcatcatcatcataatcaagaaaacaaggaagcccacaggagcacctccagagctgaatggtgtcaccaacggcggtttcataccacatagttagttaattaaaaaatgggacaaatcatcatgtctcgtaaggctccatgcaaatatgaagtgcggggcaaatgcaacagagggagtgattgcaaattcaatcacaattactggagttggcctgatagatatttattgttaagatcaaattatctcttaaatcagcttttaagaaacacagataaggctgatggtttgtcaataatatcaggagcaggtagagaagatagaactcaagactttgttcttggttctactaatgtggttcaagggtacattgatgacaaccaaggaataaccaaggctgcagcttgctatagtctacacaacataatcaagcaactacaagaaacagaagtaagacaggctagagacaacaagctttctgatagcaaacatgtggcgctccacaacttgatattatcctatatggagatgagcaaaactcctgcatctctaatcaacaacctaaagaaactaccaagggaaaaactgaagaaattagcaagattaataattgatttatcagcaggaactgacaatgactcttcatatgccttgcaagacagtgaaagcactaatcaagtgcagtaaacatggtcccaaattcattaccatagaggcagatgatatgatatggactcacaaagaattaaaagaaacactgtctgatgggatagtaaaatcacacaccaatatttatagttgttacttagaaaatatagaaataatatatgttaaaacttacttaagttagtaaaaaataaaaatagaatgggataaatgacaatgaaaacattagatgtcataaaaagtgatggatcctcagaaacgtgtaatcaactcaaaaaaataataaaaaaacactcaggtaaagtgcttattgcactaaaactgatattggccttactgacatttttcacagcaacaatcactgtcaactatataaaagtagaaaacaatttgcaggcatgtcaaccaaaaaatgaatcagacaaaaaggtcacaaagccaaataccacatcaacaacaatcagacccacacccgatccaactgtagtacatcatttgaaaaggctgattcagagacacaccaactctgtcacaaaagacagcgatacttgttggagaatacacaagaatcaacgtacaaatataaaaatatacaagttcttatgctctgggttcacaaattcaaaaggtacagattgtgaggaaccaacagccctatgcgacaaaaagttaaaaaccatagtagaaaaacatagaaaagcagaatgtcactgtctacatacaaccgagtgggggtgccttcatccctaaaataacacggctttcaacattaaaatcagaacaacctccacccaggtctatcaatacagtggtttagccatttaaaaaccgaatattatctaggctgcacgacactttgcaataatatgcaatagtcaatagttaaaccactgctgcaaactcatccataatataatcactgagtaatacaaaatcaagaaaatgggacaagtggctatggaagtaagagtggagaacattcgagcgatagacatgttcaaagcaaagataaaaaaccgtataagaagcagcaggtgctatagaaatgctacactgatccttattggactaacagcgttaagcatggcacttaatattttcctgatcatcgatcatgcaacattaagaaacatgatcaaaacagaaaactgtgctaacatgccgtcggcagaaccaagcaaaaagaccccaatgacctccacagcaggcccaaacaccaaacccaatccacagcaagcaacacagtggaccacagagaactcaacatccccagtagcaaccccagagggccatccatacacagggacaactcaaacatcagacacaacagctccccagcaaaccacagacaaacacacagcaccgctaaaatcaaccaatgaacagatcacccagacaaccacagagaaaaagacaatcagagcaacaacccaaaaaagggaaaaaggaaaagaaaacacaaaccaaaccacaagcacagctgcaacccaaacaaccaacaccaccaaccaaatcagaaatgcaagtgagacaatcacaacatccgacagacccagaactgacaccacaacccaaagcagcgaacagacaacccgggcaacagacccaagctccccaccacaccatgcatagagaggtgcaaaactcaaatgagcacaacacacaaacatcccatccaagtagttaacaaaaaaccacaaaataaccttgaaaaccaaaaaaccaaaacataaacccagacccagaaaaacatagacaccatatggaaggttctagcatatgcaccaatgagatggcatctgttcatgtatcaatagcaccaccatcattcaaggaataagaagaggcgaaaatttaagggataaatgacaatggatcccttttgtgaatctactgttaatgtttatctccctgattcatatctcaaaggagtaatatcttttagtgaaaccaatgcaattggatcatgtcttttgaaaagaccctatctaaaaaatgacaacactgccaaagttgctgtagaaaaccctgttgttgaacatgtgaggcttagaaatgcagtcatgaccaaaatgaagatatcagattataaagtggttgaaccagttaatatgcagcatgaaataatgaaaaatatacatagttgtgagcttacattattaaaacaattcttaacgagaagcaaaaacattagctctctaaaattaaatatgatatgtgattggttacagttaaaatccacttcagataacacatcaattctcaattttatagatgtggagttcatacccgtttgggtaagcaattggttcagtaactggtataatctcaataaattaatcttagagtttagaagagaagaagtaataagaactggttcaattttatgtagatcactaggcaagttagtttttattgtatcatcttatggatgtgtagtaaaaagcaacaaaagtaaaagagtgagctttttcacctataaccaactgttaacatggaaagatgtgatgttaagtagattcaatgcaaacttttgtatatgggtaagtaacaacctgaacaaaaatcaagaaggactaggacttagaagcaatctgcaaggtatgttaaccaataaattatatgaaactgttgattacatgctaagcctatgctgcaatgaaggattctctctggtgaaagagtttgaaggatttattatgagtgaaattctaaaaattactgagcatgctcagttcagtactaggtttaggaatactttattgaatgggttaactgaacaattatcagtgttgaaagctaagaacagatctagagttcttggaactatattagaaaacaacaattaccctatgtacgaagtagtacttaaattattaggggacaccttgaaaagcataaagttattaattaacaagaatttagaaaatgctgcagaattatattatatattcagaatttttggacaccctatggtagatgagagggaagcaatggatgctgttaaattaaacaatgagattacaaaaattcttaaattagagagtttaacagaactaagaggagcatttatactaagaattataaaagggtttgtagacaataataaaagatggcctaaaattaagaatttaaaagtgctcagcaaaagatgggctatgtatttcaaagctaaaagttaccctagccaacttgagctaagtgtacaagattttttagaacttgctgcagtacaatttgagcaggaattctctgtacctgaaaaaaccaaccttgagatggtattaaatgataaagcaatatcacctccaaaaaagctaatatggtctgtatatccaaaaaactacctgcctgaaactataaaaaatcaatatttagaagaggctttcaatgcaagtgacagccaaagaacaaggagagtcttagaattttacttaaaagattgtaaatttgatcaaaaagaacttaaacgttatgtaattaaacaagagtatctgaatgacaaagaccacattgtctcgttaactgggaaggaaagagaattaagtgtaggtaggatgtttgcaatgcaaccaggaaaacaaagacagatacagatattagctgagaaacttctagctgataatattgtaccttttttcccagaaactttaacaaagtatggtgacttagatctccaaagaattatggaaataaaatcagaactttcttccattaaaactagaaagaatgatagctacaacaattatattgcaagggcctctatagtaacagacttaagtaagttcaatcaggcctttagatatgaaaccacagctatatgtgcagatgtagctgatgagttacatgggacacaaagcttattctgttggttacatcttattgttcccatgactacaatgatatgtgcatacagacatgcaccaccagaaacaaaaggggaatatgatatagacaaaatacaagagcaaagcggattatacagatatcatatgggagggattgaagggtggtgccagaagttatggacaatggaagcaatatccttgttagatgtagtatctgtgaagactcgctgtcagatgacctctctattaaacggagacaatcagtcaatagatgttagtaaaccagtaaaattgtctgaaggtatagatgaagtaaaagcagactatagcttagcaattagaatgcttaaagaaataagagatgcttataaaaacattggtcataaactcaaagaaggtgaaacatatatatcaagggatctccaatttataagtaaggtgattcaatctgaaggagtcatgcatcctacccctataaaaaagatattaagagtaggtccttggataaatacaatactagatgatattaaaaccagtgcagaatcaataggaagtctatgtcaagaactagaattcagaggggagagtatactagttagcttgatattaaggaatttctggctgtataacttgtacatgtatgagtcaaaacagcacccattagctgggaagcaactgttcaagcaattgaacaaaacattaacatctgtgcagagattttttgaactgaagaaagaaaatgatgtggttgacctatggatgaatataccaatgcagtttggagggggagatccagtagttttttacagatctttttacagaaggactcccgatttcctaactgaagcaatcagccatgtggatttactgttaaaagtgtcaaacaatatcaaagatgagactaagatacgatttttcaaagccttattatctatagaaaagaatgaacgtgctacattaacaacactaatgagagaccctcaggcagtaggatcagaacgacaagctaaggtaacaagtgatataaatagaacagcagttaccagcatactgagtctatctccgaatcagctcttctgtgatagtgctatacattatagtagaaatgaggaagaagttgggatcattgcagacaacataacacctgtctatcctcatgggctgagagtgctctatgaatcactaccttttcataaggctgaaaaggttgtcaatatgatatcaggcacaaagtctataactaatctattacagagaacatctgctatcaatggtgaagatattgatagagcagtgtctatgatgttagagaacttagggttgttatctagaatattgtcagtaataattaatagtatagaaataccaatcaagtccaatggcagattgatatgctgtcaaatttccaagaccttgagagaaaaatcatggaacaatatggaaatagtaggagtgacatctcctagtattgtgacatgtatggatgttgtgtatgcaactagttctcatttaaaaggaataattattgaaaaattcagtactgacaagaccacaagaggtcagaggggaccaaaaagcccctgggtaggatcaagcactcaagagaaaaaattggttcctgtttataatagacaaattctttcaaaacaacaaaaagagcaactggaagcaatagggaaaatgaggtgggtgtacaaaggaactccagggctaagaagattgctcaacaagatttgcataggaagcttaggtattagctataaatgtgtgaaacctttattaccaagattcatgagtgtaaacttcttacataggttatctgttagtagtagacccatggaattcccagcttctgttccagcttacaggacaacaaattaccattttgacactagtccaatcaaccaagcattaagtgagaggttcgggaacgaagacattaatttagtgttccaaaatgcaatcagctgcggaattagtataatgagtgttgtagaacagttaactggtagaagcccaaaacaattagtcctaatccctcaattagaagagatagatattatgcctcctcctgtatttcaaggaaaattcaattataaactagttgataagataacctccgatcaacacatcttcagtcctgacaaaatagacatattaacactagggaagatgcttatgcctaccataaaaggtcaaaaaactgatcagttcttaaataagagagaaaactattttcatggaaataatttaattgaatctttatctgcagcacttgcatgccactggtgtgggatattaacagaacagtgcatagaaaacaatatctttaggaaagattggggtgatgggttcatctcagatcatgccttcatggatttcaaggtatttctatgtgtatttaaaaccaaacttttatgtagttggggatctcaaggaaagaatgtaaaagatgaagatataatagatgaatccattgacaaattattaagaattgacaacaccttttggagaatgttcagcaaagtcatgtttgaatcaaaagtcaaaaaaagaataatgttatatgatgtgaaattcctatcattagtaggttatataggatttaaaaactggtttatagaacagttaagagtggtagaattgcatgaggtaccttggattgtcaatgctgaaggagagttagttgaaattaaatcaatcaaaatttatctgcagttaatagaacaaagtctatctttgagaataactgtattgaattatacagacatggcacatgctcttacacgattaattaggaaaaaattgatgtgtgataatgcactctttaatccaagttcatcaccaatgtttaatctaactcaggttattgatcccacaacacaactagactattttcctaggataatatttgagaggttaaaaagttatgataccagttcagactacaacaaagggaagttaacaaggaattacatgacattattaccatggcaacacgtaaacaggtacaattttgtctttagttctacaggttgtaaagtcagtttgaagacatgcatcgggaaattgataaaggatttaaatcctaaagttctttactttattggagaaggagcaggtaactggatggcaagaacagcatgtgaatatcctgatataaaatttgtatataggagtttaaaggatgaccttgatcaccattacccattagaatatcaaagggtaataggtgatctaaatagggtgatagatagtggtgaaggattatcaatggaaaccacagatgcaactcaaaaaactcattgggacttgatacacagaataagtaaagatgctttattgataacattgtgtgatgcagaattcaaaaacagagatgatttctttaagatggtaatcctttggagaaaacatgtattatcttgtagaatctgtacagcttatggaacagatctttacttatttgcaaagtatcatgcggtggactgcaatataaaattaccattttttgtaagatctgtagctacttttattatgcaaggaagcaaattatcagggtcagaatgttacatacttttaacattaggtcatcacaataatctaccctgtcatggagaaatacaaaattccaaaatgagaatagcagtgtgtaatgatttctatgcctcaaagaaactggacaacaaatcaattgaagcaaactgcaaatctcttctatcaggattgagaatacctataaacaaaaaggagttaaatagacaaaagaaattgttaacactacaaagtaaccattcttctatagcaacagttggcggcagtaagattatagaatccaaatggttaaagaataaagcaagtacaataattgattggttagagcatattttgaattctccaaaaggtgaattaaactatgatttctttgaagcattagagaacacataccccaatatgatcaagcttatagataatttgggaaatgcagaaataaagaaactaatcaaggtcactgggtatatgcttgtgagtaagaagtaataataatgataatgattaaccataatctcacacaactgagaaaataatcgtctaacagtttagttgatcattagttatttaaaattataaaatagtaactaactgataaaaaatcagaaattgaaattgaatgtatacggtttttttgccgt

SEQ ID NO: 19 - DNA, 13350 bp, human metapneumo virus
gtataaattagattccaaaaaaatatgggacaagtgaaaatgtctcttcaagggattcacctgagtgatttatcatacaagcatgctatattaaaagagtctcagtacacaataaaaagagatgtgggtacaacaactgcagtgacaccctcatcattgcaacaagaaataacactgttgtgtggagaaattctgtatgctaaacatgctgactacaaatatgctgcagaaataggaatacaatatattagcacagctttaggatcagagagagtgcagcagattctgaggaactcaggcagtgaagtccaagtggtcttaaccagaacgtactctctggggaaaattaaaaacaataaaggagaagatttacagatgttagacatacacggggtagagaagagctgggtagaagagatagacaaagaagcaaggaaaacaatggcaaccttgcttaaggaatcatcaggtaatatcccacaaaatcagaggccctcagcaccagacacacccataatcttattatgtgtaggtgccttaatattcactaaactagcatcaaccatagaagtgggactagagaccacagtcagaagggctaaccgtgtactaagtgatgcactcaagagataccctagaatggacataccaaagattgccagatccttctatgacttatttgaacaaaaagtgtatcacagaagtttgttcattgagtatggcaaagcattaggctcatcatctacaggcagcaaagcagaaagtctatttgttaatatattcatgcaagcttatggggccggtcaaacaatgctaaggtggggggtcattgccaggtcatccaacaatataatgttaggacatgtatccgtccaagctgagttaaaacaggtcacagaagtctatgacttggtgcgagaaatgggccctgaatctggacttctacatttaaggcaaagcccaaaagctggactgttatcactagccaactgtcccaactttgcaagtgttgttctcggaaatgcctcaggcttaggcataatcggtatgtatcgagggagagtaccaaacacagaattattttcagcagctgaaagttatgccaaaagtttgaaagaaagcaataaaataaatttctcttcattaggacttacagatgaagagaaagaggctgcagaacatttcttaaatgtgagtgacgacagtcaaaatgattatgagtaattaaaaaagtgggacaagtcaaaatgtcattccctgaaggaaaagatattcttttcatgggtaatgaagcagcaaaattagcagaagctttccagaaatcattaagaaaaccaggtcataaaagatctcaatctattataggagaaaaagtgaatactgtatcagaaacattggaattacctactatcagtagacctgcaaaaccaaccataccgtcagaaccaaagttagcatggacagataaaggtggggcaaccaaaactgaaataaagcaagcaatcaaagtcatggatcccattgaagaagaagagtctaccgagaagaaggtgctaccctccagtgatgggaaaacccctgcagaaaagaaactgaaaccatcaactaacaccaaaaagaaggtttcatttacaccaaatgaaccagggaaatatacaaagttggaaaaagatgctctagatttgctctcagataatgaagaagaagatgcagaatcttcaatcttaacctttgaagaaagagatacttcatcattaagcattgaggccagattggaatcaatagaggagaaattaagcatgatattagggctattaagaacactcaacattgctacagcaggacccacagcagcaagagatgggatcagagatgcaatgattggcgtaagagaggaattaatagcagacataataaaggaagctaaagggaaagcagcagaaatgatggaagaggaaatgagtcaacgatcaaaaataggaaatggtagtgtaaaattaacagaaaaagcaaaagagctcaacaaaattgttgaagatgaaagcacaagtggagaatccgaagaagaagaagaaccaaaagacacacaagacaatagtcaagaagatgacatttaccagttaattatgtagtttaataaaaataaacaatgggacaagtaaaaatggagtcctacctagtagacacctatcaaggcattccttacacagcagctgttcaagttgatctaatagaaaaggacctgttacctgcaagcctaacaatatggttccctttgtttcaggccaacacaccaccagcagtgctgctcgatcagctaaaaaccctgacaataaccactctgtatgctgcatcacaaaatggtccaatactcaaagtgaatgcatcagcccaaggtgcagcaatgtctgtacttcccaaaaaatttgaagtcaatgcgactgtagcactcgatgaatatagcaaactggaatttgacaaactcacagtctgtgaagtaaaaacagtttacttaacaaccatgaaaccatacgggatggtatcaaaatttgtgagctcagccaaatcagttggcaaaaaaacacatgatctaatcgcactatgtgattttatggatctagaaaagaacacacctgttacaataccagcattcatcaaatcagtttcaatcaaagagagtgagtcagctactgttgaagctgctataagcagtgaagcagaccaagctctaacacaggccaaaattgcaccttatgcgggattaattatgatcatgactatgaacaatcccaaaggcatattcaaaaagcttggagctgggactcaagtcatagtagaactaggagcatatgtccaggctgaaagcataagcaaaatatgcaagacttggagccatcaagggacaagatatgtcttgaagtccagataacaaccaagcaccttggccaagagctactaaccctatctcatagatcataaagtcaccattctagttatataaaaatcaagttagaacaagaattaaatcaatcaagaacgggacaaataaaaatgtcttggaaagtggtgatcattttttcattgttaataacacctcaacacggtcttaaagagagctacttagaagagtcatgtagcactataactgaaggatatctcagtgttctgaggacaggttggtacaccaatgtttttacactggaggtaggcgatgtagagaaccttacatgtgccgatggacccagcttaataaaaacagaattagacctgaccaaaagtgcactaagagagctcagaacagtttctgctgatcaactggcaagagaggagcaaattgaaaatcccagacaatctagattcgttctaggagcaatagcactcggtgttgcaactgcagctgcagttacagcaggtgttgcaattgccaaaaccatccggcttgaaagtgaagtaacagcaattaagaatgccctcaaaaagaccaatgaagcagtatctacattggggaatggagttcgtgtgttggcaactgcagtgagagagctgaaagattttgtgagcaagaatctaacacgtgcaatcaacaaaaacaagtgcgacattgctgacctgaaaatggccgttagcttcagtcaattcaacagaaggttcctaaatgttgtgcggcaattttcagacaacgctggaataacaccagcaatatctttggacttaatgacagatgctgaactagccagagctgtttccaacatgccaacatctgcaggacaaataaaactgatgttggagaaccgtgcaatggtaagaagaaaagggttcggattcctgataggagtttacggaagctccgtaatttacatggtgcaactgccaatctttggggttatagacacgccttgctggatagtaaaagcagccccttcttgttcaggaaaaaagggaaactatgcttgcctcttaagagaagaccaaggatggtattgtcaaaatgcagggtcaactgtttactacccaaatgaaaaagactgtgaaacaagaggagaccatgtcttttgcgacacagcagcaggaatcaatgttgctgagcagtcaaaggagtgcaacataaacatatctactactaattacccatgcaaagttagcacaggaagacatcctatcagtatggttgcactatctcctcttggggctttggttgcttgctacaagggagtgagctgttccattggcagcaacagagtagggatcatcaagcaactgaacaaaggctgctcttatataaccaaccaagacgcagacacagtgacaatagacaacactgtataccagctaagcaaagttgaaggcgaacagcatgttataaaaggaaggccagtgtcaagcagctttgacccagtcaagtttcctgaagatcaattcaatgttgcacttgaccaagttttcgagagcattgagaacagtcaggccttggtggatcaatcaaacagaatcctaagcagtgcagagaaaggaaacactggcttcatcattgtaataattctaattgctgtccttggctctaccatgatcctagtgagtgtttttatcataataaagaaaacaaagaaacccacaggagcacctccagagctgagtggtgtcacaaacaatggcttcataccacataattagttaattaaaaataaagtaaattaaaataaattaaaattaaaaataaaaatttgggacaaatcataatgtctcgcaaggctccgtgcaaatatgaagtgcggggcaaatgcaatagaggaagtgagtgcaagtttaaccacaattactggagttggccagatagatacttattaataagatcaaattatttattaaatcaacttttaaggaacactgatagagctgatggcttatcaataatatcaggagcaggcagagaagataggacacaagattttgtcctaggttccaccaatgtggttcaaggttatattgatgataaccaaagcataacaaaagctgcagcctgttacagtctacataatataatcaaacaactacaagaagttgaagttaggcaggctagagataacaaactatctgacagcaaacatgtagcacttcacaacttagtcctatcttatatggagatgagcaaaactcctgcatctttaatcaacaatctcaagagactgccgagagagaaactgaaaaaattagcaaagctcataattgacttatcagcaggtgctgaaaatgactcttcatatgccttgcaagacagtgaaagcactaatcaagtgcagtgagcatggtccagttttcattactatagaggttgatgacatgatatggactcacaaggacttaaaagaagctttatctgatgggatagtgaagtctcatactaacatttacaattgttatttagaaaacatagaaattatatatgtcaaggcttacttaagttagtaaaaacacatcagagtgggataaatgacaatgataacattagatgtcattaaaagtgatgggtcttcaaaaacatgtactcacctcaaaaaaataattaaagaccactctggtaaagtgcttattgtacttaagttaatattagctttactaacatttctcacagtaacaatcaccatcaattatataaaagtggaaaacaatctgcaaatatgccagtcaaaaactgaatcagacaaaaaggactcatcatcaaataccacatcagtcacaaccaagactactctaaatcatgatatcacacagtattttaaaagtttgattcaaaggtatacaaactctgcaataaacagtgacacatgctggaaaataaacagaaatcaatgcacaaatataacaacatacaaatttttatgttttaaatctgaagacacaaaaaccaacaattgtgataaactgacagatttatgcagaaacaaaccaaaaccagcagttggagtgtatcacatagtagaatgccattgtatatacacagttaaatggaagtgctatcattacccaaccgatgaaacccaatcctaaatgttaacaccagattaggatccatccaagtctgttagttcaacaatttagttatttaaaaatattttgaaaacaagtaagtttctatgatacttcataataataagtaataattaattgcttaatcatcatcacaacattattcgaaaccataactattcaatttaaaaagtaaaaaacaataacatgggacaagtagttatggaggtgaaagtggagaacattcgaacaatagatatgctcaaagcaagagtaaaaaatcgtgtggcacgcagcaaatgctttaaaaatgcctctttggtcctcataggaataactacattgagtattgccctcaatatctatctgatcataaactataaaatgcaaaaaaacacatctgaatcagaacatcacaccagctcatcacccatggaatccagcagagaaactccaacggtccccacagacaactcagacaccaactcaagcccacagcatccaactcaacagtccacagaaggctccacactctactttgcagcctcagcaagctcaccagagacagaaccaacatcaacaccagatacaacaaaccgcccgcccttcgtcgacacacacacaacaccaccaagcgcaagcagaacaaagacaagtccggcagtccacacaaaaaacaacccaaggacaagctctagaacacattctccaccacgggcaacgacaaggacggcacgcagaaccaccactctccgcacaagcagcacaagaaagagaccgtccacagcatcagtccaacctgacatcagcgcaacaacccacaaaaacgaagaagcaagtccagcgagcccacaaacatctgcaagcacaacaagaatacaaaggaaaagcgtggaggccaacacatcaacaacatacaaccaaactagttaacaaaaaatacaaaataactctaagataaaccatgcagacaccaacaatggagaagccaaaagacaattcacaatctccccaaaaaggcaacaacaccatattagctctgcccaaatctccctggaaaaaacactcgcccatataccaaaaataccacaaccaccccaagaaaaaaactgggcaaaacaacacccaagagacaaataacaatggatcctctcaatgaatccactgttaatgtctatcttcctgactcatatcttaaaggagtgatttcctttagtgagactaatgcaattggttcatgtctcttaaaaagaccttacctaaaaaatgacaacactgcaaaagttgccatagagaatcctgttatcgagcatgttagactcaaaaatgcagtcaattctaagatgaaaatatcagattacaagatagtagagccagtaaacatgcaacatgaaattatgaagaatgtacacagttgtgagctcacattattaaaacagtttttaacaaggagtaaaaatattagcactctcaaattaaatatgatatgtgattggctgcagttaaagtctacatcagatgatacctcaatcctaagttttatagatgtagaatttatacctagctgggtaagcaattggtttagtaattggtacaatctcaacaagttgattctggaattcaggaaagaagaagtaataagaactggttcaatcttgtgtaggtcattgggtaaattagtttttgttgtatcatcatatggatgtatagtcaagagcaacaaaagcaaaagagtgagcttcttcacatacaatcaactgttaacatggaaagatgtgatgttaagtagattcaatgcaaatttttgtatatgggtaagcaacagtctgaatgaaaatcaagaagggctagggttgagaagtaatctgcaaggcatattaactaataagctatatgaaactgtagattatatgcttagtttatgttgcaatgaaggtttctcacttgtgaaagagttcgaaggctttattatgagtgaaattcttaggattactgaacatgctcaattcagtactagatttagaaatactttattaaatggattaactgatcaattaacaaaattaaaaaataaaaacagactcagagttcatggtaccgtgttagaaaataatgattatccaatgtacgaagttgtacttaagttattaggagatactttgagatgtattaaattattaatcaataaaaacttagagaatgctgctgaattatactatatatttagaatattcggtcacccaatggtagatgaaagagatgcaatggatgctgtcaaattaaacaatgaaatcacaaaaatccttaggtgggagagcttgacagaactaagaggggcattcatattaaggattatcaaaggatttgtagacaacaacaaaagatggcccaaaattaaaaacttaaaagtgcttagtaagagatggactatgtacttcaaagcaaaaagttaccccagtcaacttgaattaagcgaacaagattttttagagcttgctgcaatacagtttgaacaagagttttctgtccctgaaaaaaccaaccttgagatggtattaaatgataaagctatatcacctcctaaaagattaatatggtctgtgtatccaaaaaattacttacctgagaaaataaaaaatcgatatctagaagagactttcaatgcaagtgatagtctcaaaacaagaagagtactagagtactatttgaaagataataaattcgaccaaaaagaacttaaaagttatgttgttaaacaagaatatttaaatgataaggatcatattgtctcgctaactggaaaagaaagagaattaagtgtaggtagaatgtttgctatgcaaccaggaaaacagcgacaaatacaaatattggctgaaaaattgttagctgataatattgtaccttttttcccagaaaccttaacaaagtatggtgatctagatcttcagagaataatggaaatcaaatcggaactttcttctattaaaactagaagaaatgatagttataataattacattgcaagagcatccatagtaacagatttaagtaagttcaaccaagcctttaggtatgaaactacagcgatctgtgcggatgtagcagatgaactacatggaacacaaagcctattctgttggttacatcttatcgtccctatgacaacaatgatatgtgcctatagacatgcaccaccagaaacaaaaggtgaatatgatatagataagatagaagagcaaagtggtttatatagatatcatatgggtggtattgaaggatggtgtcaaaaactctggacaatggaagctatatctctattagatgttgtatctgtaaaaacacgatgtcaaatgacatctttattaaacggtgacaaccaatcaatagatgtaagtaaaccagttaagttatctgagggtttagatgaagtgaaagcagattatagcttggctgtaaaaatgttaaaagaaataagagatgcatacagaaatataggccataaacttaaagaaggggaaacatatatatcaagagatcttcagtttataagtaaggtgattcaatctgaaggagtaatgcatcctacccctataaaaaagatcttaagagtgggaccatggataaacacaatattagatgacattaaaaccagtgcagagtcaatagggagtctatgtcaggaattagaatttaggggggaaagcataatagttagtctgatattaaggaatttttggctgtataatttatacatgcatgaatcaaagcaacaccccctagcagggaagcagttattcaaacaactaaataaaacattaacatcagtgcagagattttttgaaataaaaaaggaaaatgaagtagtagatctatggatgaacataccaatgcagtttggaggaggagatccagtagtcttctatagatctttctatagaaggacccctgattttttaactgaagcaatcagtcatgtggatattctgttaagaatatcagccaacataagaaatgaagcgaaaataagtttcttcaaagccttactgtcaatagaaaaaaatgaacgtgctacactgacaacactaatgagagatcctcaagctgttggctcagagcgacaagcaaaagtaacaagtgatatcaatagaacagcagttaccagcatcttaagtctttctccaaatcaacttttcagcgatagtgctatacactacagtagaaatgaagaagaggtcggaatcattgctgacaacataacacctgtttatcctcatggactgagagttttgtatgaatcattaccttttcataaagctgaaaaagttgtgaatatgatatcaggaacgaaatccataaccaacttattacagagaacatctgctattaatggtgaagatattgacagagctgtatccatgatgctggagaacctaggattattatctagaatattgtcagtagttgttgatagtatagaaattccaaccaaatctaatggtaggctgatatgttgtcagatatctagaaccctaagggagacatcatggaataatatggaaatagttggagtaacatcccctagcatcactacatgcatggatgtcatatatgcaactagctctcatttgaaagggataatcattgaaaagttcagcactgacagaactacaagaggtcaaagaggtccaaagagcccttgggtagggtcgagcactcaagagaaaaaattagttcctgtttataacagacaaattctttcaaaacaacaaagagaacagctagaagcaattggaaaaatgagatgggtatataaagggacaccaggtttaagacgattactcaataagatttgtcttggaagtttaggcattagttacaaatgtgtaaaacctttattacctaggtttatgagtgtaaatttcctacacaggttatctgtcagtagtagacctatggaattcccagcatcagttccagcttatagaacaacaaattaccattttgacactagtcctattaatcaagcactaagtgagagatttgggaatgaagatattaatttggtcttccaaaatgcaatcagctgtggaattagcataatgagtgtagtagaacaattaactggtaggagtccaaaacagttagttttaatacctcaattagaagaaatagacattatgccaccaccagtgtttcaagggaaattcaattataagctagtagataagataacttctgatcaacatatcttcagtccagacaaaatagatatgttaacactggggaaaatgctcatgcccactataaaaggtcagaaaacagatcagttcctgaacaagagagagaattatttccatgggaataatcttattgagtctttgtcagcagcgttagcatgtcattggtgtgggatattaacagagcaatgtatagaaaataatattttcaagaaagactggggtgacgggttcatatcggatcatgcttttatggacttcaaaatattcctatgtgtctttaaaactaaacttttatgtagttgggggtcccaagggaaaaacattaaagatgaagatatagtagatgaatcaatagataaactgttaaggattgataatactttttggagaatgttcagcaaggttatgtttgaatcaaaggttaagaaaaggataatgttatatgatgtaaaatttctatcattagtaggttatatagggtttaagaattggtttatagaacagttgagatcagctgagttgcatgaggtaccttggattgtcaatgccgaaggtgatctggttgagatcaagtcaattaaaatctatttgcaactgatagagcaaagtttatttttaagaataactgttttgaactatacagatatggcacatgctctcacaagattaatcagaaagaagttgatgtgtgataatgcactattaactccgattccatccccaatggttaatttaactcaagttattgatcctacagaacaattagcttatttccctaagataacatttgaaaggctaaaaaattatgacactagttcaaattatgctaaaggaaagctaacaaggaattacatgatactgttgccatggcaacatgttaatagatataactttgtctttagttctactggatgtaaagttagtctaaaaacatgcattggaaaacttatgaaagatctaaaccctaaagttctgtactttattggagaaggggcaggaaattggatggccagaacagcatgtgaatatcctgacatcaaatttgtatacagaagtttaaaagatgaccttgatcatcattatcctttggaataccagagagttataggagaattaagcaggataatagatagcggtgaagggctttcaatggaaacaacagatgcaactcaaaaaactcattgggatttgatacacagagtaagcaaagatgctttattaataactttatgtgatgcagaatttaaggacagagatgatttttttaagatggtaattctatggaggaaacatgtattatcatgcagaatttgcactacttatgggacagacctctatttattcgcaaagtatcatgctaaagactgcaatgtaaaattacctttttttgtgagatcagtagccacctttattatgcaaggtagtaaactgtcaggctcagaatgctacatactcttaacactaggccaccacaacaatttaccctgccatggagaaatacaaaattctaagatgaaaatagcagtgtgtaatgatttttatgctgcaaaaaaacttgacaataaatctattgaagccaactgtaaatcacttttatcagggctaagaataccgataaataagaaagaattaaatagacagagaaggttattaacactacaaagcaaccattcttctgtagcaacagttggaggtagcaaggtcatagagtctaaatggttaacaaacaaggcaaacacaataattgattggttagaacatattttaaattctccaaaaggtgaattaaattatgatttttttgaagcattagaaaatacttaccctaatatgattaaactaatagataatctagggaatgcagagataaaaaaactgatcaaagtaactggatatatgcttgtaagtaaaaaatgaaaaatgataaaaatgataaaataggtgacaacttcatactattccaaagtaatcatttgattatgcaattatgtaatagttaattaaaaactaaaaatcaaaagttagaaactaacaactgtcattaagtttattaaaaataagaaattataattggatgtatacg

SEQ ID NO: 20 - DNA, 13215 bp, human metapneumo virus
acgcgaaaaaaacgcgtataaattaagttacaaaaaaccatgggacaagtgaaaatgtctcttcaagggattcacctgagtgatctatcatacaagcatgctatattaaaagagtctcagtatacaataaagagagatgtaggcacaacaaccgcagtgacaccctcatcattgcaacaagaaataacactattgtgtggagaaattctatatgctaagcatgctgattacaaatatgctgcagaaataggaatacaatatattagcacagctctaggatcagagagagtacagcagattctaagaaactcaggtagtgaagtccaagtggttttaaccagaacgtactccttggggaaagttaaaaacaacaaaggagaagatttacagatgttagacatacacggagtagagaaaagctgggtggaagagatagacaaagaagcaagaaaaacaatggcaactttgcttaaagaatcatcaggcaatattccacaaaatcagaggccttcagcaccagacacacccataatcttattatgtgtaggtgccttaatatttaccaaactagcatcaactatagaagtgggattagagaccacagtcagaagagctaaccgtgtactaagtgatgcactcaaaagataccctaggatggacataccaaaaatcgctagatctttctatgacttatttgaacaaaaagtgtattacagaagtttgttcattgagtatggcaaagcattaggctcatcctctacaggcagcaaagcagaaagtttattcgttaatatattcatgcaagcttacggtgctggtcaaacaatgctgaggtggggagtcattgccaggtcatctaacaatataatgttaggacatgtatctgttcaagctgagttaaaacaagtcacagaagtctatgacctggtgcgagaaatgggccctgaatctgggctcctacatttaaggcaaagcccaaaagctggactgttatcactagccaattgtcccaactttgctagtgttgttctcggcaatgcctcaggcttaggcataataggtatgtatcgcgggagagtgccaaacacagaactattttcagcagcagaaagctatgccaagagtttgaaagaaagcaataaaattaacttttcttcattaggactcacagatgaagaaaaagaggctgcagaacacttcctaaatgtgagtgacgacagtcaaaatgattatgagtaattaaaaaaatgggacaagtcaaaatgtcattccctgaaggaaaagatattcttttcatgggtaatgaagcagcaaaattggcagaagcttttcaaaaatcattaagaaaacctaatcataaaagatctcaatctattataggagaaaaagtgaacactgtatctgaaacattggaattacctactatcagtagacctaccaaaccgaccatattgtcagagccgaagttagcatggacagacaaaggtggggcaatcaaaactgaagcaaagcaaacaatcaaagttatggatcctattgaagaagaagagtttactgagaaaagggtgctgccctccagtgatgggaaaactcctgcagaaaagaagttgaaaccatcaaccaacactaaaaagaaggtctcatttacaccaaatgaaccaggaaaatacacaaagttggagaaagatgctctagacttgctttcagacaatgaagaagaagatgcagaatcctcaatcttaaccttcgaagaaagagatacttcatcattaagcattgaagccagactagaatcgattgaggagaaattaagcatgatattagggctattaagaacactcaacattgctacagcaggacccacagcagcaagagatgggatcagagatgcaatgattggcataagggaggaactaatagcagacataataaaagaagccaagggaaaagcagcagaaatgatggaagaagaaatgaaccagcggacaaaaataggaaacggtagtgtaaaattaactgaaaaggcaaaggagctcaacaaaattgttgaagacgaaagcacaagtggtgaatccgaagaagaagaagaaccaaaagacacacaggaaaataatcaagaagatgacatttaccagttaattatgtagtttaataaaaataaaaatgggacaagtgaaaatggagtcctatctggtagacacttatcaaggcatcccttacacagcagctgttcaagttgatctagtagaaaaggacctgttacctgcaagcctaacaatatggttccccttgtttcaggccaatacaccaccagcagttctgcttgatcagctaaagactctgactataactactctgtatgctgcatcacaaagtggtccaatactaaaagtgaatgcatcagcccagggtgcagcaatgtctgtacttcccaaaaagtttgaagtcaatgcgactgtagcacttgacgaatatagcaaattagaatttgacaaacttacagtctgtgaagtaaaaacagtttacttaacaaccatgaaaccatatgggatggtatcaaagtttgtgagctcggccaaatcagttggcaaaaaaacacatgatctaatcgcattatgtgattttatggatctagaaaagaacacaccagttacaataccagcatttatcaaatcagtttctatcaaggagagtgaatcagccactgttgaagctgcaataagcagtgaagcagaccaagctctaacacaagccaaaattgcaccttatgcgggactgatcatgattatgaccatgaacaatcccaaaggcatattcaagaagcttggagctgggacccaagttatagtagaactaggagcatatgtccaggctgaaagcataagtaaaatatgcaagacttggagccatcaaggaacaagatatgtgctgaagtccagttaacagccaagcaacctggccaagaactaccaactctattctatagactaaaaagtcgccattttagttatataaaaatcaagttagaataagaattaaatcaatcaagaacgggacaaataaaaatgtcttggaaagtggtgatcattttttcattgctaataacacctcaacacggtcttaaagagagctacctagaagaatcatgtagcactataactgagggatatcttagtgttctgaggacaggttggtataccaacgtttttacattagaggtgggtgatgtagaaaaccttacatgttctgatggacctagcctaataaaaacagaattagatctgaccaaaagtgcactaagagagctcaaaacagtctctgctgaccaattggcaagagaggaacaaattgagaatcccagacaatctaggtttgttctaggagcaatagcactcggtgttgcaacagcagctgcagtcacagcaggtgttgcaattgccaaaaccatccggcttgagagtgaagtcacagcaattaagaatgccctcaaaacgaccaatgaagcagtatctacattggggaatggagttcgagtgttggcaactgcagtgagagagctaaaagactttgtgagcaagaatttaactcgtgcaatcaacaaaaacaagtgcgacattgatgacctaaaaatggctgttagcttcagtcaattcaacagaaggtttctaaatgttgtgcggcaattttcagacaatgctggaataacaccagcaatatctttggacttaatgacagatgctgaactagccagggccgtttctaacatgccgacatctgcaggacaaataaaattgatgttggagaaccgtgcgatggtgcgaagaaaggggttcggaatcctgataggggtctacgggagctccgtaatttacacggtgcagctgccaatctttggcgttatagacacgccttgctggatagtaaaagcagccccttcttgttccgaaaaaaagggaaactatgcttgcctcttaagagaagaccaagggtggtattgtcagaatgcagggtcaactgtttactacccaaatgagaaagactgtgaaacaagaggagaccatgtcttttgcgacacagcagcaggaattaatgttgctgagcaatcaaaggagtgcaacatcaacatatccactacaaattacccatgcaaagtcagcacaggaagacatcctatcagtatggttgcactgtctcctcttggggctctggttgcttgctacaaaggagtaagctgttccattggcagcaacagagtagggatcatcaagcagctgaacaaaggttgctcctatataaccaaccaagatgcagacacagtgacaatagacaacactgtatatcagctaagcaaagttgagggtgaacagcatgttataaaaggcagaccagtgtcaagcagctttgatccaatcaagtttcctgaagatcaattcaatgttgcacttgaccaagtttttgagaacattgaaaacagccaggccttagtagatcaatcaaacagaatcctaagcagtgcagagaaagggaatactggctttatcattgtaataattctaattgctgtccttggctctagcatgatcctagtgagcatcttcattataatcaagaaaacaaagaaaccaacgggagcacctccagagctgagtggtgtcacaaacaatggcttcataccacacagttagttaattaaaaataaaataaaatttgggacaaatcataatgtctcgcaaggctccatgcaaatatgaagtgcggggcaaatgcaacagaggaagtgagtgtaagtttaaccacaattactggagttggccagatagatacttattaataagatcaaactatctattaaatcagcttttaaggaacactgatagagctgatggcctatcaataatatcaggcgcaggcagagaagacagaacgcaagattttgttctaggttccaccaatgtggttcaaggttatattgatgataaccaaagcataacaaaagctgcagcctgctacagtctacacaacataatcaagcaactacaagaagttgaagttaggcaggctagagatagcaaactatctgacagcaagcatgtggcactccataacttaatcttatcttacatggagatgagcaaaactcccgcatctttaatcaacaatcttaaaagactgccgagagaaaaactgaaaaaattagcaaagctgataattgacttatcagcaggcgctgacaatgactcttcatatgccctgcaagacagtgaaagcactaatcaagtgcagtgagcatggtcctgttttcattactatagaggttgatgaaatgatatggactcaaaaagaattaaaagaagctttgtccgatgggatagtgaagtctcacaccaacatttacaattgttatttagaaaacatagaaattatatatgtcaaggcttacttaagttagtaaaaacacacatcagagtgggataagtgacaatgataacattagatgtcattaaaagtgatgggtcttcaaaaacatgtactcacctcaaaaaaataatcaaagaccattctggtaaagtgcttattgcacttaagttaatattagctttactaacatttttcacaataacaatcactataaattacataaaagtagaaaacaatctacaaatatgccagtcaaaaactgaatcagacaaagaagactcaccatcaaataccacatccgtcacaaccaagactactctagaccatgatataacacagtattttaaaagattaattcaaaggtatacagattctgtgataaacaaggacacatgctggaaaataagcagaaatcaatgcacaaatataacaacatataaatttttatgctttaaacctgaggactcaaaaatcaacagttgtgatagactgacagatctatgcagaaacaaatcaaaatcagcagctgaagcatatcatacagtagaatgccattgcatatacacaattgagtggaagtgctatcaccacccaatagattaaacccaattttgaatgttaaaactagactaggatccgtctaagactatcagttcaatagtttagttatttaaaaatatttgagaacaggtaagtttctatggcacttcatagcaataggtaataattaacagcttaattataattaaaacattatttaaaaccgtaactatttaatttacaaagtaaaaacaaaaatatgggacaagtagttatggaggtgaaagtagagaacattcgagcaatagacatgctcaaagcaagagtgaaaaatcgtgtggcacgtagcaaatgctttaaaaatgcttctttaatcctcataggaataactacactgagtatagctctcaatatctatctgatcataaactacacaatacaaaaaaccacatccgaatcagaacaccacaccagctcaccacccacagaacccaacaaggaagcttcaacaatctccacagacaacccagacatcaatccaagctcacagcatccaactcaacagtccacagaaaaccccacactcaaccccgcagcatcagcgagcccatcagaaacagaaccagcatcaacaccagacacaacaaaccgcctgtcctccgtagacaggtccacagcacaaccaagtgaaagcagaacaaagacaaaaccgacagtccacacaatcaacaacccaaacacagcttccagtacacaatccccaccacggacaacaacgaaggcaatccgcagagccaccactttccgcatgagcagcacaggaaaaagaccaaccacaacattagtccagtccgacagcagcaccacaacccaaaatcatgaagaaacaggttcagcgaacccacaggcgtctgcaagcacaatgcaaaactagcacaccaataatataaaaccaaattagttaacaaaaaatgcgagatagctctaaagcaaaacatgtaggtaccaacaatcaagaaaccaaaagacaactcacaatctccctaaaacagcaacgacaccatgtcagctttgctcaaatctctctgggagaaacttctacccacatactaacaacatcacaaccatctcaagaaaagaaactgggcaaaacagcatccaagagacaaatagcaatggatcctcttaatgaatccactgttaatgtctatctccctgattcgtaccttaaaggagtaatttcttttagtgaaactaatgcaattggttcatgtctcttaaaaagaccttacttaaaaaatgacaacactgcaaaagttgccatagagaatcctgttattgagcatgtgagactcaaaaatgcagtcaattctaaaatgaaaatatcagattacaaggtagtagagccagtaaacatgcaacatgaaataatgaagaatgtacacagttgtgagctcacactattgaaacagtttttaacaaggagtaaaaacattagcactctcaaattaaatatgatatgtgattggctgcaattaaagtctacatcagatgatacctcaatcctaagtttcatagatgtagaatttatacctagttgggtaagcaactggtttagtaattggtacaatctcaataagttaattttggaattcagaagagaggaagtaataagaaccggttcaatcttatgcaggtcattgggtaaattagtttttattgtatcatcatacggatgtatcgtcaagagcaacaaaagcaaaagagtgagcttcttcacatacaatcaactgttaacatggaaagatgtgatgttaagtagatttaatgcgaatttttgtatatgggtaagcaatagtctgaatgaaaatcaggaagggctagggttaagaagtaatctacaaggtatgttaactaataaactatatgaaactgtagattatatgctaagtttatgttgcaatgaaggtttctcacttgtaaaagagttcgaaggttttattatgagtgaaatccttaggattactgaacatgctcaattcagtactagatttagaaatactttattaaatggattaacagatcaattaacaaaattaaaaaataaaaacagactcagagttcatggtaccgtattagaaaataatgattatccaatgtatgaagttgtacttaaattattaggagatactttgagatgtatcaaattattaatcaataaaaacttagagaatgctgcagaattatactatatattcagaatttttggtcatccaatggtagatgaaagagatgcaatggatgctgtcaaattaaacaatgaaatcacaaaaatcctaaggttggagagcttgacagaactaagaggagcattcatattaaggattatcaaaggatttgtggacaacaacaaaaggtggcccaaaattaaaaatttaatagtgcttagcaaaagatggactatgtacttcaaagctaaaaattatcccagtcaactcgaattaagtgaacaagactttctagagcttgctgcaatacaatttgaacaagagttttctgttcctgaaaaaaccaatcttgagatggtattaaatgacaaagccatatcacctcctaaaagattaatatggtctgtgtatccaaagaattacttacctgagacgataaaaaatcgatatttagaagaaactttcaatgcgagtgatagtctcaaaacaagaagagtactagagtactatttaaaagacaataaatttgatcaaaaggaacttaaaagttatgtagttagacaagaatatttaaatgataaggagcacattgtctcattaactggaaaagaaagagaattaagtgtaggtagaatgtttgctatgcaaccaggaaaacagcgacaaatacaaatattggcagaaaaattgttagctgataacattgtacctttcttcccggaaaccttaacaaagtatggtgatctagatcttcagagaataatggaaatcaaatcagaactttcttctatcaaaaccagaagaaatgacagttataataattacattgcaagagcatccatagtaacagatttgagcaagttcaaccaagcctttagatatgaaactacagcgatctgtgcggatgtagcagacgaattacatggaacacaaagcttattctgttggttacatcttatcgttcctatgactacaatgatatgtgcctatagacatgcaccaccagaaacaaaaggtgaatatgatatagataagatagaagagcaaagtggtctatatagatatcacatgggcggtattgaaggatggtgtcaaaaactctggacaatggaagctatatctttattggatgttgtatctgtaaagacacggtgtcaaatgacatctttattaaacggtgataaccaatcaatagatgtaagtaaaccagtcaagttatctgaaggtttagatgaagtgaaggcagattatcgcttagcaataaaaatgctaaaagaaataagagatgcatacagaaatataggccataaacttaaagaaggggaaacatatatatcaagggatcttcaatttataagcaaggtgattcaatctgaaggagtgatgcatcctacccctataaaaaaggtcttgagagtaggaccatggataaacacaatattagatgacattaaaactagtgctgagtcaatagggagtctatgtcaagaattagaatttaggggagaaagcataatagttagtctgatattaagaaacttctggctgtataacttatacatgcatgaatcaaagcaacatcctttggcagggaaacagttattcaaacaactaaataaaacattaacatcagtgcagagattttttgaaattaaaaaggaaaatgaggtagtagatctatggatgaacataccaatgcaatttggaggaggagatccagtagtcttctatagatctttctatagaaggacccctgattttttaactgaggcaatcagccatgtagatattctgttaaaaatatcagctaacataaaaaatgaaacgaaagtaagtttcttcaaagccttactatcaatagaaaaaaatgaacgtgctacactgacaacgctaatgagagatcctcaagctgttggatcagaacgacaagcaaaagtaacaagtgacatcaatagaacagcagttaccagtatcttaagtctttccccaaatcaacttttcagtgatagtgctatacactatagcaggaatgaagaagaagtgggaatcattgcagaaaacataacacctgtttatcctcatgggctgagagtattatatgaatcattgccctttcacaaagctgaaaaagttgtaaacatgatatcagggacaaaatctataaccaacttattacagagaacatccgctattaatggtgaagatattgacagggctgtatctatgatgttggagaatctaggattattatctagaatattgtcagtagttgttgatagtatagaaattccaatcaaatctaatggtaggctgatatgttgtcaaatctctaggactttaagagagacatcatggaataatatggaaatagttggagtaacatctcctagcatcactacatgtatggatgtcatatatgcaactagttctcatttgaaggggataattatagaaaagttcagcactgacagaactacaaggggtcaaagaggtccaaaaagcccttgggtagggtcgagtactcaagagaaaaaattagtacctgtttataacagacaaattctttcaaaacaacaaagagaacagctagaagcaattggaaaaatgagatgggtgtataaagggacaccaggcttgcgacgattactcaacaagatctgtcttgggagtttaggcattagttacaaatgtgtaaaacctttattacctaggtttatgagtgtaaatttcttacataggttatctgtcagtagtagacctatggaattcccagcatcagttccagcttatagaacaacaaattaccatttcgacactagtcctattaatcaagcactaagtgagagatttgggaatgaagatattaacttggtcttccaaaatgcgatcagctgtggaattagcataatgagtgtagtagaacaattaacaggtagaagcccaaaacagttagttttaataccccaattagaagaaatagacattatgccaccaccagtgtttcaagggaaattcaattataaattagtagataagataacttctgatcaacatatcttcagtccggacaaaatagatatgttaacactagggaaaatgctcatgcctactataaaaggtcagaaaacagatcagttcttaaataagagagagaattatttccatgggaacaatcttattgagtctttatcagcagcattagcatgtcattggtgtgggatattaacagaacaatgcatagaaaataatattttcaagaaggactggggtgacgggtttatatcagatcatgcttttatggacttcaaaatattcctatgtgtctttaaaactaaacttttatgtagttggggatcccaagggaaaaacattaaagatgaagatatagtagatgaatcaatagataaattgttaaggattgacaatactttttggagaatgttcagcaaagttatgtttgaaccaaaagttaagaaaaggataatgttatatgatgtaaaattcctatcactagtaggctacatagggtttaagaactggtttatagagcagttgagatcagctgaattgcatgaaataccttggattgtcaatgccgaaggtgatttggttgagatcaagtcaattaaaatctatttgcaactgatagaacaaagcttatttttaagaataactgttttgaactatacagatatggcacatgctctcacacgattaatcagaaagaagttaatgtgtgataatgcactgttaaccccaatttcatccccaatggttaacttaactcaagttattgatcccacaacacaattagattacttccccaagataacattcgaaaggctaaaaaattatgacacaagttcaaattatgctaaaggaaagctaacaagaaattacatgatactattgccatggcagcatgttaatagatataactttgtctttagttctactggatgtaaagttagtctgaaaacatgtattggaaaacttatgaaagacttaaatcctaaagttttgtactttattggagaaggagcaggaaattggatggccagaacagcatgtgaatatcctgatattaaatttgtatatagaagtctgaaagatgaccttgatcatcattatcctctggaataccagagagtgataggtgaattaagcagaatcatagatagtggtgaaggactttcaatggaaacaacagacgcaactcaaaaaactcattgggatttgatacacagggtaagcaaagatgctttattaataactttatgtgatgcagaatttaaggacagagatgatttttttaagatggtaattctatggagaaaacatgtattatcatgcagaatttgcactacttatgggacggacctctatttattcgcaaagtatcatgctaaagactgcaatgtaaaattacctttttttgtgagatcagttgctactttcattatgcagggtagtaagctgtcaggttcagaatgctacatactcttaacactaggccaccacaacagtttaccttgccatggagaaatacaaaattctaagatgaaaatagcagtgtgtaatgatttttatgctgcaaaaaaactcgacaataaatcaattgaagctaattgtaaatcacttttgtcagggctaagaatacctataaataagaaggaactagatagacagagaagattattaacactacaaagcaatcattcttctgtggcaacagttggcggtagcaagatcatagagtctaaatggttaacaaacaaagcaagtacaataattgattggttagaacatattttaaattctccaaagggcgaattaaattatgatttttttgaagcattggagaacacttaccctaatatgattaaactaatagataacttagggaatgcagagattaaaaaacttatcaaagtaacaggatacatgcttgtaagtaaaaaatgaaaaatgatgaagatgacaaaatagatgacaacttcatactattctaaattaattatttgattat

SEQ ID NO: 21 - DNA, 13135 bp, human metapneumo virus
acgcgaaaaaaacgcgtataaattaaattccaaacaaaacgggacaaataaaaatgtctcttcaagggattcacctaagtgatctgtcatataaacatgctatattaaaagagtctcaatacacaataaaaagagatgtaggcaccacaactgcagtgacaccttcatcattgcagcaagagataacacttttgtgtggagagattctttacactaaacatactgattacaaatatgctgcagagatagggatacaatatatttgcacagctctaggatcagaaagagtacaacagattttaagaaattcaggtagtgaggttcaggtggttctaaccaagacatactctttagggaaaggtaaaaatagtaaaggggaagagttgcaaatgttagatatacatggagtggaaaagagttgggtagaagaaatagacaaagaggcaagaaaaacaatggtgactttgctaaaggaatcatcaggcaacatcccacaaaaccagaggccttcagcaccagacacaccaataattttattgtgtgtaggtgctttaatattcactaaactagcatcaacaatagaagttggactagagactacagttagaagggctaacagagtgttaagtgatgcgctcaaaagataccctagggtagatataccaaagattgctagatctttttatgaactatttgagcagaaagtgtattacaggagtctattcattgagtatgggaaagctttaggctcatcttcaacaggaagcaaagcagaaagtttgtttgtaaatatatttatgcaagcttatggagccggtcagacaatgctaaggtggggtgtcattgccagatcatctaacaacataatgctagggcatgtatctgtgcaagctgaattgaaacaagttacagaggtttatgatttggtaagagaaatgggtcctgaatctgggcttttacatctaagacaaagtccaaaggcaggactgttatcgttggctaattgccccaattttgctagtgttgttcttggtaatgcttcaggtctaggtataatcggaatgtacaggggaagagtgccaaacacagagctattttctgcagcagaaagttatgccagaagcttaaaagaaagcaacaaaatcaacttctcctcattagggctcacagacgaagaaaaagaagctgcagaacacttcttaaacatgagtgatgacaatcaagatgattatgagtaattaaaaaactgggacaagtcaaaatgtcattccctgaaggaaaagatatcctgttcatgggtaatgaagcagcaaaaatagcagaagctttccagaaatcactaaaaagatcaggtcacaaaagaacccagtctattgtaggggaaaaagtaaacactatatcagaaactctagagctacctaccatcagcaaacctgcacgatcatctacactgctagagccaaaattggcatgggcagacagcagcggagccaccaaaaccacagaaaaacaaacaaccaaaacaacagatcctgttgaagaagaggaactcaatgaaaagaaggtatcaccttccagtgatgggaagactcctgcagagaaaaaatcaaaatctccaaccaatgtaaaaaagaaagtttccttcacatcaaatgaaccagggaaatatactaaactagaaaaagatgccctagatttgctctcagacaatgaggaagaagacgcagagtcctcaatcctaacctttgaagagagagacacatcatcactaagcattgaggctagactagaatcaatagaagagaagctaagcatgatattaggactgcttcgtacacttaacattgcaacagcaggaccaacggctgcaagggatggaatcagagatgcaatgattggtataagagaagaactaatagcagaaataataaaagaagcaaagggaaaagcagccgaaatgatggaagaggaaatgaatcaaaggtcaaaaataggtaatggcagtgtaaaactaaccgagaaggcaaaagaacttaataaaattgttgaagacgagagcacaagtggtgaatcagaagaagaagaagaaccaaaagaaactcaggataacaatcaaggagaagatatctaccagttaatcatgtagtttaataaaaataaacaatgggacaagtcaagatggagtcctatctagtggacacttatcaaggcattccctacacagctgctgttcaagttgatctggtagaaaaagacttactaccagcaagtttgacaatatggtttcctctattccaagccaacacaccaccagcggttttgctcgatcagctaaaaaccttgactataacaactctgtatgctgcatcacagaatggtccaatactcaaagtaaatgcatcagctcagggtgctgctatgtctgtacttcccaaaaaattcgaagtaaatgcaactgtggcacttgatgaatacagcaaacttgactttgacaagttaacggtttgcgatgttaaaacagtttatttgacaaccatgaagccatatgggatggtgtcaaaatttgtgagttcagccaaatcagttggcaaaaagacacatgatctaattgcactgtgtgacttcatggacctagagaaaaatatacctgtgacaataccagcattcataaagtcagtttcaatcaaagagagtgagtcagccactgttgaagctgcaataagcagtgaggccgaccaagcattaacacaagccaaaattgcaccctatgcaggactaatcatgatcatgaccatgaacaatccaaaaggtatattcaagaaactaggagctggaacacaagtgatagtagagctaggggcatatgttcaagccgagagcatcagcaggatctgcaagagctggagtcaccaaggaacaagatatgtactaaaatccagataaaaataactgtcctaatcaataattgcttatataatcctaaagatcaatgagcttattattatagttatataaaaataatttagaactagaaaggtattaatagaaagcgggacaagtaaaaatgtcttggaaagtgatgattatcatttcgttactcataacacctcagcacggactaaaagaaagttatttagaagaatcatgtagtactataactgaaggatatctcagtgttttaagaacaggttggtacaccaatgtctttacattagaagttggtgatgttgaaaatcttacatgtactgatggacctagcttaatcaaaacagaacttgacctaaccaaaagtgctctgagagaactcaaaacagtttctgctgatcagttagcgagagaagaacaaattgaaaatcccagacaatcaaggtttgtcctaggtgcaatagctcttggagttgccacagcagcagcagtcacagcaggcattgcaatagccaaaaccataagacttgagagtgaagtgaatgcaatcaaaggtgctctcaaaacaaccaacgaggcagtatccacactaggaaatggagtgcgagtcctagccactgcagtaagagagctgaaagaatttgtgagcaaaaacctgactagtgcgatcaacaagaacaaatgtgacattgctgatctgaagatggctgtcagcttcagtcaattcaacagaagattcctaaatgttgtgcggcagttttcagacaatgcagggataacaccagcaatatcattggacctaatgactgatgctgagctggccagagctgtatcatacatgccaacatctgcaggacagataaaactaatgttagagaaccgtgcaatggtgaggagaaaaggatttggaatcttgataggggtctacggaagctctgtgatttacatggtccagctgccgatctttggtgtcatagatacaccttgttggataatcaaggcagctccctcttgttcagaaaaagatggaaattatgcttgcctcctaagagaggatcaagggtggtattgcaaaaatgcaggatccactgtttactacccaaatgaaaaagactgcgaaacaagaggtgatcatgttttttgtgacacagcagcagggatcaatgttgctgagcaatcaagagaatgcaacatcaacatatctaccaccaactacccatgcaaagtcagcacaggaagacaccctatcagcatggttgcactatcacctctcggtgctttggtagcttgctacaagggggttagctgctcgattggcagtaatcgggttggaataatcaaacaactacctaaaggctgctcatacataactaaccaggacgcagacactgtaacaattgacaacactgtgtatcaactaagcaaagttgagggtgaacagcatgtaataaaagggagaccagtttcaagcagttttgatccaatcaggtttcctgaggatcagttcaatgttgcgcttgatcaagtctttgaaagcattgaaaacagtcaagcactagtggaccagtcaaacaaaattctgaacagtgcagaaaaaggaaacactggtttcattattgtaataattttgattgctgttcttgggttaaccatgatttcagtgagcatcatcatcataatcaaaaaaacaaggaagcccacaggggcacctccagagctgaatggtgttaccaacggcggttttataccgcatagttagttaattaaaaaatgggacaaatcatcatgtctcgcaaagctccatgcaaatatgaagtacggggcaagtgcaacaggggaagtgagtgcaaattcaaccacaattactggagctggcctgataggtatttattgttaagatcaaattatctcttgaatcagcttttaagaaacactgataaggctgatggtttgtcaataatatcaggagcaggtagagaagataggactcaagactttgttcttggttctactaatgtggttcaagggtacattgataacaatcaaggaataacaaaggctgcagcttgctatagtctacataacataataaaacagctacaagaaatagaagtaagacaggctagagataataagctttctgacagcaaacatgtggcacttcacaacttgatattatcctatatggagatgagcaaaactcctgcatccctgattaataacctaaagaaactaccaagagaaaaactgaagaaattagcgaaattaataattgatttatcagcaggaactgataatgactcttcatatgccttgcaagacagtgaaagcactaatcaagtgcagtaagcatggtcccaaattcattaccatagaggcagatgatatgatatggacacacaaagaattaaaggagacactgtctgatgggatagtaaaatcacacaccaatatttacagttgttatttagaaaatatagaaataatatatgttaaagcttacttaagttagtaaaaaataaatagaatgggataaatgacaatgaaaacattagatgtcataaaaagtgatggatcctcagaaacatgtaatcaactcaaaaaaataataaaaaaacactcaggtaaattgcttattgcattaaaactgatattggccttattgacgtttttcacagtaacaattactgttaactatataaaagtagaaaacaatttgcaggcatgtcaattaaaaaatgaatcagacaaaaaggacacaaagctaaataccacatcaacaacaatcagacccattcctgatctaaatgcagtacagtacttgaaaaggctgattcagaaacacaccaactttgtcataaaagacagagatacctgttggagaatacacacgaatcaatgcacaaatataaaaatatataagttcttatgtttcgggtttatgaattcaacaaatacagactgtgaagaactaacagttttatgtgataaaaagtcaaaaaccatgacagaaaaacataggaaagcagagtgtcactgtctacatacaaccgagtggtggtgttattatctttaagagaaaactcggctttcaacattaaaatcagaacaaatcctatccagatctattaatataatagtttagtcattcaaaaactctaaatattgtctagacttcacaacactttgcggtcatatgcaataatcaatggtcaaaccactgttgcaaactcacccataatataatcactgagtaatacaaaacaagaaaatgggacaagtggccatggaagtaagagtggagaacattcgggcaatagacatgttcaaagcaaaaatgaaaaaccgtataagaagtagcaagtgctatagaaatgctacactgatccttattggattaacagcattaagtatggcacttaatatttttttaatcattgattatgcaatgttaaaaaacatgaccaaagtggaacactgtgttaatatgccgccggtagaaccaagcaagaagaccccaatgacctctgcagtagacttaaacaccaaacccaatccacagcaggcaacacagttggccgcagaggattcaacatctctagcagcaacctcagaggaccatctacacacagggacaactccaacaccagatgcaacagtctctcagcaaaccacagacgagtacacaacattgctgagatcaaccaacagacagaccacccaaacaaccacagagaaaaagccaaccggagcaacaaccaaaaaagaaaccacaactcgaactacaagcacagctgcaacccaaacactcaacactaccaaccaaactagctatgtgagagaggcaaccacaacatccgccagatccagaaacagtgccacaactcaaagcagcgaccaaacaacccaggcagcagacccaagctcccaaccacaccatacacagaaaagcacaacaacaacatacaacacagacacatcctctccaagtagttaacaaaaaaactataaaataatcatgaaaaccgaaaaactagaaaagttaatttgaactcagaaaagaacacaaacactatatgaattgtttgagcgtatatactaatgaaatagcatctgtttgtgcatcaataataccatcattatttaagaaataagaagaagctaaaattcaagggacaaataacaatggatccattttgtgaatccactgtcaatgtttatcttcctgactcatatctcaaaggagtaatatctttcagtgaaaccaatgcaattggctcatgccttttgaaaagaccctatctaaaaaaagataacactgctaaagttgctgtagaaaaccctgttgttgaacatgtcaggcttagaaatgcagtcatgaccaaaatgaagatatcagattataaagtggttgaaccaattaatatgcagcatgaaataatgaaaaatatacacagttgtgagctcacattattaaaacaattcttaacaagaagtaaaaacattagctctctaaaattaagtatgatatgtgattggttacagttaaaatccacctcagataacacatcaattcttaattttatagatgtggagtttatacctgtttgggtgagcaattggtttagtaactggtataatctcaataaattaatcttagagtttagaagagaggaagtaataagaactggttcaattttatgtagatcactaggcaagttagttttcattgtatcatcttatgggtgtgtagtaaaaagcaacaaaagtaaaagagtaagttttttcacatataaccaactgttaacatggaaagatgtgatgttaagtaggttcaatgcaaacttttgtatatgggtaagtaacaacctgaacaaaaatcaagaaggactaggatttagaagtaatctgcaaggtatgttaaccaataaattatatgaaactgttgattatatgttaagtctatgtagtaatgaagggttctcactagtgaaagagttcgaaggctttattatgagtgaaattcttaaaattactgagcatgctcaattcagtactaggtttaggaatactttattaaatgggttgactgaacaattatcaatgttgaaagctaaaaacagatctagagttcttggcactatattagaaaacaatgattaccccatgtatgaagtagtacttaaattattaggggacactttgaaaagtataaaattattaattaacaagaatttagaaaatgctgcagaattatattatatattcagaatttttggacaccctatggtagatgagagggaagcaatggatgctgttaaattaaataatgagattacaaaaattcttaaactggagagcttaacagaactaagaggagcatttatactaagaattataaaagggtttgtagataataataaaagatggcctaaaattaagaatttaaaagtgctcagtaaaagatgggttatgtatttcaaagccaaaagttaccctagccaacttgagctaagtgtacaagattttttagaacttgctgcagtacaattcgaacaggaattttctgtccctgaaaaaaccaaccttgagatggtattaaatgataaagcaatatctcctccaaaaaagttaatatggtcggtatatccaaaaaattatctacctgaaattataaaaaatcaatatttagaagaggtcttcaatgcaagtgacagtcaaagaacgaggagagtcttagaattttacttaaaagattgcaaatttgatcaaaaagaccttaaacgttatgtacttaaacaagagtatctaaatgacaaagaccacattgtctcattaactgggaaggaaagagaattaagtgtaggcaggatgtttgcaatgcaaccaggcaaacaaagacaaatacagatactagctgagaaacttctagctgataatattgtaccctttttcccagaaactttaacaaagtatggtgacttggatctccaaagaattatggaaatgaaatcagaactttcttccattaaaactaggaagaatgatagttacaacaattatattgcaagagcctccatagtaacagacctaagtaaattcaatcaagcctttagatatgaaaccacagctatctgtgcagatgtagcagatgagttacatggtacgcaaagcttattttgttggttacatcttattgttcccatgaccacaatgatatgtgcatacagacatgcaccaccagaaacaaagggggagtatgacatagacaaaatagaagagcaaagtgggctatacagatatcatatgggagggattgaagggtggtgtcagaagttatggacaatggaagcgatatccttgttagatgtagtatctgttaagactcgttgtcagatgacctctctattaaacggagacaatcaatcaatagatgtcagtaaaccagtaaaattgtctgaaggtatagatgaagtaaaagcagattatagcttagcaattaaaatgcttaaagagataagagatgcctataaaaacattggccataaactcaaagaaggtgaaacatatatatcaagagatctccaatttataagtaaggtgattcaatctgagggggtcatgcatcctacccccataaaaaagatattaagggtaggtccctggataaatacaatactagatgacattaaaaccagtgcagaatcaatagggagtctgtgtcaagaactagagttcagaggagaaagtatgctagttagcttgatattaaggaatttctggctgtataacttatacatgcatgagtcaaaacagcatccgttagctggaaaacaactgtttaagcaattgaacaaaacactaacatctgtgcaaagattttttgagctgaagaaagaaaatgatgtggttgacctatggatgaatataccaatgcagtttggagggggagacccagtagttttttacagatctttttacagaaggactcctgatttcctgactgaagcaatcagccatgtggatttactgttaaaagtttcgaacaatattaaaaatgagactaagatacgattctttaaagccttattatctatagaaaagaatgaacgtgcaacattaacaacactaatgagagacccccaggcggtaggatcggaaagacaagctaaggtaacaagtgatataaatagaacagcagttactagcatactgagtctatctccgaatcagctcttttgtgatagtgctatacactatagcagaaatgaagaagaagtcgggatcattgcagacaacataacacctgtttatcctcacggattgagagtgctctatgaatcactaccttttcataaggctgaaaaggttgtcaatatgatatcaggtacaaagtctataactaacctattgcagagaacatctgctatcaatggtgaagatattgatagagcagtgtctatgatgttagagaacttagggttgttatctaggatattgtcagtaataattaatagtatagaaataccaattaagtccaatggcagattgatatgctgtcaaatttctaagactttgagagaaaaatcatggaacaatatggaaatagtaggagtgacatctccaagtattgtaacatgtatggatgttgtgtatgcaactagttctcatttaaaaggaataattattgaaaaattcagtactgacaagaccacaagaggtcagaggggaccaaaaagcccctgggtaggatcaagcactcaagagaaaaaattagttcctgtttataatagacaaattctttcaaaacaacaaaaggagcaactggaagcaataggaaaaatgaggtgggtgtataaaggaactccagggctaagaagattgctcaataagatttgcataggaagtttaggtattagctataaatgtgtaaaacctctattaccaagattcatgagtgtaaacttcttacataggttatctgttagtagcagacccatggaattcccagcttctgttccagcttataggacaacaaattaccactttgacactagtccaatcaaccaagcattaagtgagaggttcgggaacgaagacattaatctagtgttccaaaatgcaatcagctgcggaattagtataatgagtgttgtagaacagttaactggtagaagcccaaaacaattagtcttaatcccccaattagaagagatagatattatgcctcctcctgtatttcaaggaaaattcaattataaactagttgataaaataacctctgatcaacacatcttcagtcctgacaaaatagacatattaacactagggaagatgcttatgcctactataaaaggtcaaaaaactgatcagttcttaaataagagagaaaactatttccatggaaataatttaattgaatctttatctgcagcacttgcatgccactggtgtggaatattaacagaacagtgtgtagaaaacaatatctttaggaaagactggggtgatgggttcatatcagatcatgccttcatggatttcaagatatttctatgtgtatttaaaaccaaacttttatgtagttggggatcccaagggaaaaatgtaaaagatgaagatataatagatgaatccattgacaaattattaagaattgacaacactttttggagaatgttcagcaaagtcatgtttgaatcaaaggtcaaaaaaagaataatgttatatgatgtaaaattcctatcattagtaggttatataggatttaaaaactggtttatagagcagttaagagtagtagaattgcatgaagtgccctggattgtcaatgctgaaggggagctagttgaaattaaaccaatcaaaatttatttgcagttaatagaacaaagtctatctttaagaataactgttttgaattatacagacatggcacatgctcttacacgattaattaggaagaaattgatgtgtgataatgcactcttcaatccaagttcatcaccaatgtttagtctaactcaagttatcgatcctacaacacagctagactattttcctaaggtgatatttgaaaggttaaaaagttatgataccagttcagactacaacaaagggaagttaacaagaaattacatgacattattaccatggcagcacgtaaacaggtataattttgtctttagttcaacaggatgtaaaatcagcttgaagacatgcatcgggaaattgataaaggacttaaaccctaaggttctttactttattggagaaggagcaggtaactggatggcaagaacagcatgtgagtatcctgacataaaatttgtatataggagtttaaaggatgatcttgatcatcattacccattagaatatcaaagggtaataggtgatttaaatagggtaatagatggtggtgaaggactatcaatggagaccacagatgcaactcaaaagactcattgggacttaatacacagaataagtaaagatgctttattgataacattgtgtgatgcagaattcaaaaacagagatgatttctttaaaatggtaattctttggagaaaacatgtattatcatgtagaatctgtacagcttatggaacagatctttacttatttgcaaagtatcatgcgacggactgcaatataaaattaccattttttgtaaggtctgtagctacttttattatgcaaggaagcaaattgtcaggatcagaatgttacatacttttaacattaggtcatcacaataatctgccatgccatggagaaatacaaaattccaaaatgagaatagcagtgtgtaatgatttccatgcctcaaaaaaactagacaacaaatcaattgaagctaactgtaaatctcttctatcaggattaagaataccaataaacaaaaaagagttaaatagacaaaagaaactgttaacactacaaagcaatcattcttccatagcaacagttggcggcagtaagattatagaatccaaatggttaaagaataaagcaagtacaataattgattggttagagcatatcttgaattctccaaaaggtgaattaaactatgatttctttgaagcattagagaacacataccccaatatgatcaagcttatagataacctgggaaatgcagagataaaaaaactaatcaaagttcctgggtatatgcttgtgagtaagaagtaataataat

SEQ ID NO: 22 - DNA, 24 bp, Artificial Sequence
  Primer
aaagaattcacgagaaaaaaacgc

SEQ ID NO: 23 - DNA, 22 bp, Artificial Sequence
  Primer
ctgtggtctctagtcccacttc

SEQ ID NO: 24 - DNA, 18 bp, Artificial Sequence
  Primer
catgcaagcttatggggc

SEQ ID NO: 25 - DNA, 21 bp, Artificial Sequence
  Primer
cagagtggttattgtcagggt

SEQ ID NO: 26 - DNA, 19 bp, Artificial Sequence
  Primer
gtagaactaggagcatatg

SEQ ID NO: 27 - DNA, 22 bp, Artificial Sequence
  Primer
tccccaatgtagatactgcttc

SEQ ID NO: 28 - DNA, 20 bp, Artificial Sequence
  Primer
gcactcaagagataccctag

SEQ ID NO: 29 - DNA, 22 bp, Artificial Sequence
  Primer
agactttctgctttgctgcctg

SEQ ID NO: 30 - DNA, 20 bp, Artificial Sequence
  Primer
ccctgacaataaccactctg

SEQ ID NO: 31 - DNA, 22 bp, Artificial Sequence
  Primer
gccaactgatttggctgagctc

SEQ ID NO: 32 - DNA, 23 bp, Artificial Sequence
  Primer
tgcctatctcctcttggggcttg

SEQ ID NO: 33 - DNA, 22 bp, Artificial Sequence
  Primer
tcaaagctgcttgacactggcc

SEQ ID NO: 34 - DNA, 22 bp, Artificial Sequence
  Primer
catgcccactataaaaggtcag

SEQ ID NO: 35 - DNA, 20 bp, Artificial Sequence
  Primer
caccccagtctttcttgaaa

SEQ ID NO: 36 - DNA, 18 bp, Artificial Sequence
  Primer
tgcttgtacttcccaaag

SEQ ID NO: 37 - DNA, 18 bp, Artificial Sequence
  Primer
tatttgaacaaaaagtgt

SEQ ID NO: 38 - DNA, 19 bp, Artificial Sequence
  Primer
tggtgtgggatattaacag

SEQ ID NO: 39 - DNA, 66 bp, Artificial Sequence
  Primer
aagcccaaaagctggactgtttagccaactgtcccaactttgcaaggttctcggaaatgcctcagg

SEQ ID NO: 40 - DNA, 66 bp, Artificial Sequence
  Primer
aagcccaaaagctggactgtttagccaactgtcctaactttgcaaggttctcggaaatgcctcagg

SEQ ID NO: 41 - DNA, 66 bp, Artificial Sequence
  Primer
aagcccaaaagctggactgtttagccaattgtcccaactttgcaaggttctcggcaatgcctcagg

SEQ ID NO: 42 - DNA, 66 bp, Artificial Sequence
  Primer
aagcccaaaagctggattgtttagccaattgtcccaactttgcaaggttctcggcaatgcctcagg

SEQ ID NO: 43 - DNA, 66 bp, Artificial Sequence
  Primer
aagcccaaaagctggactgtttagccaattgtcccaactttgctaggttctcggcaatgcctcagg

SEQ ID NO: 44 - DNA, 66 bp, Artificial Sequence
  Primer
aagtccaaaggcagggctgtttggccaattgccccaattttgctaggttcttggcaatgcttcagg

SEQ ID NO: 45 - DNA, 66 bp, Artificial Sequence; identical to SEQ ID NO: 44
  Primer

SEQ ID NO: 46 - DNA, 18 bp, Artificial Sequence
  Primer
cccaccaccagagagaaa

SEQ ID NO: 47 - DNA, 18 bp, Artificial Sequence
  Primer
accaccagagagaaaccc

SEQ ID NO: 48 - DNA, 18 bp, Artificial Sequence
  Primer
accagagagaaacccacc

SEQ ID NO: 49 - DNA, 18 bp, Artificial Sequence
  Primer
agagagaaacccaccacc

SEQ ID NO: 50 - DNA, 18 bp, Artificial Sequence
  Primer
gagaaacccaccaccaga

SEQ ID NO: 51 - DNA, 18 bp, Artificial Sequence
  Primer
aaacccaccaccagagag

SEQ ID NO: 52 - DNA, 18 bp, Artificial Sequence
  Primer
ggaggcaagcgaacgcaa

SEQ ID NO: 53 - DNA, 18 bp, Artificial Sequence
  Primer
ggcaagcgaacgcaagga

SEQ ID NO: 54 - DNA, 18 bp, Artificial Sequence
  Primer
aagcgaacgcaaggaggc

SEQ ID NO: 55 - DNA, 18 bp, Artificial Sequence
  Primer
cgaacgcaaggaggcaag

SEQ ID NO: 56 - DNA, 18 bp, Artificial Sequence
  Primer
acgcaaggaggcaagcga

SEQ ID NO: 57 - DNA, 18 bp, Artificial Sequence
  Primer
caaggaggcaagcgaacg

SEQ ID NO: 58 - DNA, 20 bp, Artificial Sequence
  Primer
tgttgtcgagactattccaa

SEQ ID NO: 59 - DNA, 20 bp, Artificial Sequence
  Primer
tgttgwaccagttgcagtct

SEQ ID NO: 60 - DNA, 23 bp, Artificial Sequence
  Primer
tgctgcttctattgagaaacgcc

SEQ ID NO: 61 - DNA, 20 bp, Artificial Sequence
  Primer
ggtgacttcyaatagggcca

SEQ ID NO: 62 - DNA, 21 bp, Artificial Sequence
  Primer
ctcgaggttgtcaggatatag

SEQ ID NO: 63 - DNA, 21 bp, Artificial Sequence
  Primer
ctttgggagttgaacacagtt

SEQ ID NO: 64 - DNA, 20 bp, Artificial Sequence
  Primer
ttcrgttttagctgcttacg

SEQ ID NO: 65 - DNA, 21 bp, Artificial Sequence
  Primer
aggcaaatctctggataatgc

SEQ ID NO: 66 - DNA, 18 bp, Artificial Sequence
  Primer
tcgtaacgtctcgtgacc

SEQ ID NO: 67 - DNA, 20 bp, Artificial Sequence
  Primer
ggagatctttctagagtgag

SEQ ID NO: 68 - DNA, 21 bp, Artificial Sequence
  Primer
  misc_feature 10, 19: n = A,T,C or G
  misc_feature 10, 19: n = A,T,C or G
ccttggtgantctatccgnag

SEQ ID NO: 69 - DNA, 25 bp, Artificial Sequence
  Primer
  misc_feature 17: n = A,T,C or G
  misc_feature 17: n = A,T,C or G
ctgccactgctagttgngataatcc

SEQ ID NO: 70 - DNA, 25 bp, Artificial Sequence
  Primer
gggcttctaagcgacccagatcttg

SEQ ID NO: 71 - DNA, 27 bp, Artificial Sequence
  Primer
gaatttccttatggacaagctctgtgc

SEQ ID NO: 72 - DNA, 25 bp, Artificial Sequence
  Primer
ggagcaggaactccaagacctggag

SEQ ID NO: 73 - DNA, 25 bp, Artificial Sequence
  Primer
gctcaacctcatcacatactaaccc

SEQ ID NO: 74 - DNA, 27 bp, Artificial Sequence
  Primer
gagatgggcgggcaagtgcggcaacag

SEQ ID NO: 75 - DNA, 28 bp, Artificial Sequence
  Primer
gcctttgcaatcaggatccaaatttggg

SEQ ID NO: 76 - DNA, 24 bp, Artificial Sequence
  Primer
ctgctgcagttcaggaaacatcag

SEQ ID NO: 77 - DNA, 22 bp, Artificial Sequence
  Primer
accggatgtgctcacagaactg

SEQ ID NO: 78 - DNA, 21 bp, Artificial Sequence
  Primer
tttgttataggcatatcattg

SEQ ID NO: 79 - DNA, 18 bp, Artificial Sequence
  Primer
ttaaccagcaaagtgtta

SEQ ID NO: 80 - DNA, 21 bp, Artificial Sequence
  Primer
ttagggcaagagatggtaagg

SEQ ID NO: 81 - DNA, 19 bp, Artificial Sequence
  Primer
ttataacaatgatggaggg

SEQ ID NO: 82 - DNA, 21 bp, Artificial Sequence
  Primer
cattaaaaagggcacagacgc

SEQ ID NO: 83 - DNA, 17 bp, Artificial Sequence
  Primer
tggacattctccgcagt

SEQ ID NO: 84 - DNA, 907 bp, human metapneumo virus
atggaggtgaaagtggagaacattcgaacaatagatatgctcaaagcaagagtaaaaaatcgtgtggcacgcagcaaatgctttaaaaatgcctctttggtcctcataggaataactacattgagtattgccctcaatatctatctgatcataaactataaaatgcaaaaaaacacatctgaatcagaacatcacaccagctcatcacccatggaatccagcagagaaactccaacggtccccacagacaactcagacaccaactcaagcccacagcatccaactcaacagtccacagaaggctccacactctactttgcagcctcagcaagctcaccagagacagaaccaacatcaacaccagatacaacaaaccgcccgcccttcgtcgacacacacacaacaccaccaagcgcaagcagaacaaagacaagtccggcagtccacacaaaaaacaacccaaggacaagctctagaacacattctccaccacgggcaacgacaaggacggcacgcagaaccaccactctccgcacaagcagcacaagaaagagaccgtccacagcatcagtccaacctgacatcagcgcaacaacccacaaaaacgaagaagcaagtccagcgagcccacaaacatctgcaagcacaacaagaatacaaaggaaaagcgtggaggccaacacatcaacaacatacaaccaaactagttaacaaaaaatacaaaataactctaagataaaccatgcagacaccaacaatggagaagccaaaagacaattcacaatctccccaaaaaggcaacaacaccatattagctctgcccaaatctccctggaaaaaacactcgcccatataccaaaaataccacaaccaccccaagaaaaaaactgggcaaaacaacacccaa

SEQ ID NO: 85 - DNA, 908 bp, human metapneumo virus
atggaggtgaaagtggagaacattcgaacaatagatatgctcaaagcaagtgtaaaaaatcgtgtggcacgcagcaaatgctttaaaaatgcctctttggtcctcataggaataactacattgagtattgccctcaatatctatctgatcataaactataaaatgcaaaaaaacacatctgaatcagaacatcacaccagctcatcacccatggaatccagcagagaaactccaacggtccccacagacaactcagacaccaactcaagcccacagcatccaactcaacagtccacagaaggctccacactctactttgcagcctcagcaagctcaccagagacagaaccaacatcaacaccagatacaacaaaccgcccgcccttcgtcgacacacacacaacaccaccaagcgcaagcagaacaaagacaagtccggcagtccacacaaaaaacaacccaaggacaagctctagaacacattctccaccacgggcaacgacaaggacggcacgcaggaaccaccactctccgcacaagcagcacaagaaagagaccgtccacagcatcagtccaacctgacatcagcgcaacaacccacaaaaacgaagaagcaagtccagcgagcccacaaacatctgcaagcacaacaagaatacaaaggaaaagcgtggaggccaacacatcaacaacatacaaccaaactagttaacaaaaaatacaaaataactctaagataaaccatgcagacaccaacaatggagaagccaaaagacaattcacaatctccccaaaaaggcaacaacaccatattagctctgcccaaatctccctggaaaaaacactcgcccatataccaaaaataccacaaccaccccaagaaaaaaactgggcaaaacaacacccaa

SEQ ID NO: 86 - DNA, 907 bp, human metapneumo virus
atggaggtgaaagtggagaacattcgaacaatagatatgctcaaagcaagagtaaaaaatcgtgtggcacgcagcaaatgctttaaaaatgcctctttggtcctcataggaataactacactgagtattgccctcaatatctatctgatcataaactataaaatgcaaaaaaacacatctgaatcagaacatcacaccagctcatcacccatggaatccagcagagaaactccaacggtccccacagataattcagacaccaactcaagcccacaacatccaactcaacagtccacagaaggctccacactctactttgcagcctcagcaaactcaccagagacagaaccaacatcaacaccagacacaacaaaccgcccgcccttcgtcgacacacacacaacaccaccaagcgcaagcagaacaaagacaagtccggcagtccacacaaaaaacaacccaaggataagctccagaacacactctccaccatgggcaacgacaaggacggcacgcagaaccaccactctccgcacaagcagcacaagaaagagaccgtccacagcatcagcccaacccgacatcagcgcaacaacccacaaaaacgaagaagcaagtccagcgagcccacaaacatctgcaagcacaacaagaacacaaaggaaaagcgtggaggccaacacatcaacaacatacaaccaaactagttaacaaaaaatacaaaataactctaagataaaccatgcagacaccaacaatggagaagtcaaaagacaattcacaatctccccaaaaaggcaacaacaccatattagctctgcccaaatctccctggaaaaaacactcgcccatataccaaaaataccacaaccaccccaagaaaaaaactgggcaaaacaacacccaa

SEQ ID NO: 87 - DNA, 907 bp, human metapneumo virus
atggaggtgaaagtggagaacattcgaacaatagatatgctcaaagcaagagtaaaaaatcgtgtggcacgcagcaaatgctttaaaaatgcctctttggtcctcataggaataactacattgagtattgccctcaatatctatctgatcataaactataaaatgcaaaaaaacacatctgaatcagaacatcacaccagctcatcacccatggaatccagcagagaaactccaacggtccccacagataattcagacaccaactcaagcccacaacatccaactcaacagtccacagaaggctccacactctactttgcagcctcagcaaactcaccagagacagaaccaacatcaacaccagacacaacagaccgcccgcccttcgtcgacacacacacaacaccaccaagcgcaagcagaacaaagacaagtccggcagtccacacaaaaaacaacccaaggataagctccagaacacattctccaccatgggcaacgacaaggacggcacgcagaaccaccactctccgcacaagcagcacaagaaagagaccgtccacagcatcagtccaacccgacatcagcgcaacaacccacaaaaacgaagaagcaagtccagcgagcccacaaacatctgcaagcacaacaagaacacaaaggaaaagcgtggaggccaacacatcaacaacatacaaccaaactagttaacaaaaaatacaaaataactctaagataaaccatgcagacaccaacaatggagaagtcaaaagacaattcacaatctccccaaaaaggcaacaacaccatattagctctgcccaaatctccctggaaaaaacactcgcccatataccaaaaataccacaaccaccccaagaaaaaaactgggcaaaacaacacccaa

SEQ ID NO: 88 - DNA, 907 bp, human metapneumo virus
atggaggtgaaagtggagaacattcgaacaatagatatgctcaaagcaagagtaaaaaatcgtgtggcacgcagcaaatgctttaaaaatgcctctttggtcctcataggaataactacattgagtattgccctcaatatctatctgatcataaactataaaatgcaaaaaaacacatctgaatcagaacatcacaccagctcatcacccatggaatccagcagagaaactccaacggtccccacagataattcagacaccaactcaagcccacaacatccaactcaacagtccacagaaggctccacactctactttgcagcctcagcaagctcaccagagacagaaccaacatcaacaccagacacaacagaccgcccgcccttcgtcgacacacacacaacaccaccaagcgcaagcagaacaaagacaagtccggcagtccacacaaaaaacaacccaaggataagctccagaacacattctccaccatgggcaacgacaaggacggcacgcagaaccaccactctccgcacaagcagcacaagaaagagaccgtccacagcatcagtccaacccgacatcagcgcaacaacccacaaaaacgaagaagcaagtccagcgagcccacaaacatctgcaagcacaacaagaacacaaaggaaaagcgtggaggccaacacatcaacaacatacaaccaaactagttaacaaaaaatacaaaataactctaagataaaccatgcagacaccaacaatggagaagtcaaaagacaattcacaatctccccaaaaaggcaacaacaccatattagctctgcccaaatctccctggaaaaaacactcgcccatataccaaaaataccacaaccaccccaagaaaaaaactgggcaaaacaacacccaa

SEQ ID NO: 89 - DNA, 907 bp, human metapneumo virus
atggaggtgaaagtggagaacattcgaacaatagatatgctcaaagcaagagtgaaaaatcgtgtggcacgcagcaaatgctttaaaaatgcctctttgatcctaataggaataactacattgagtatagccctcaatatctatctgatcataaactatacaatgcaagaaaacacatccgaatcagaacatcacaccagctcatcacccatggaatccagcagggaaactccaacggtccccatagacaactcagacaccaatccaggctcacagtatccaactcaacagtccacagaagactccacactccactctgcagcttcagcaagctcaccagagacagaaccaacatcaacaccagacacaacaagccgcccgcccttcgtcgacacacacacaacaccaccaagtgcaagcaggacaaggacaagtccggcagtccacacaaaaaacaatccaagggtaagccccagaacacattccccaccatgggcaatgacaaggacggtccgcggaaccaccactctccgcacaagcagcacaagaaaaagactgtctacagcatcagtccaacccgacagcagcgcaacaacccacaaacacgaagaaacaagcccagtgagcccacaaacatctgcaagcacagcaagaccacaaaggaagggcatggaggccagcacatcaacaacatacaaccaaactagttaacaaaaaatacaaaataactctaagataaaccatgtagacaccaacaattgagaagccaaaaggcaattcacaatctcccaaaaaagcaacaacaccatattagctccgcttaaatctccctgaaaaaaacactcacccatataccaactataccacaaccatcccaagaaaaaaggctgggcaaaacaacacccaa

SEQ ID NO: 90 - DNA, 908 bp, human metapneumo virus
atggaggtgaaagtggagaacattcgaacaatagatatgctcaaagcaagagtgaaaaatcgtgtggcacgcagcaaatgctttaaaaatgcctctttgatcctaataggaataactacattgagtatagccctcaatatctatctgatcataaactatacaatgcaagaaaacacatccgaatcagaacatcacaccagttcatcacccatggaatccagcagggaaactccaacggtccctatggacaactcagacaccaatccaggctcacagtatccaactcaacagtccacagaaggctccacactccactttgcagcctcagcaagctcaccagagacagaaccaacatcaacaccagacacaacaagccgcccgcccttcgtcgacacacacacaacaccatcaagtgcaagcagaacaaagacaagtccggcagtccacacaaaaaacaatctaaggataagccccagaacacattccccaccatgggcaatgacaaggacggtccgtggaaccaccactctccgcacaagcagcataagaaaaagaccgtccacagcatcagtccaacctgacagcagcgcaacaacccacaaacacgaagaagcaagcccagtgagcccgcaagcatctgcaagcacagcaagaccacaaaggaagggcatggaggccagcacatcaacaacatacaaccaaactagttaacaaaaaatataaaataactctaagataaaccatgtagacaccaacaattgagaagccaaaaggcaattcacaatctccccaaaaaggcaacaacaccatattagctccgcttaaatctccctggaaaaaacactcgcccatataccaactataccacaaccatcccaaggaaaaaagctgggtaaaacaacacccaa

SEQ ID NO: 91 - DNA, 908 bp, human metapneumo virus
atggaggtgaaagtggagaacattcgaacaatagatatgctcaaagcaagagtgaaaaatcgtgtggcacgcagcaaatgctttaaaaatgcctctttgatcctaataggaataactacattgagtatagccctcaatatctatctgatcataaactatacaatgcaagaaaacacatccgaatcagaacatcacaccagctcatcacccatggaatccagcagagaaactccaacggtccctatggacaactcagacaccaatccaggctcacagtatccaactcaacagtccacagaaggctccacactccactttgcagcctcagcaagctcaccagagacagaaccaacatcaacaccagacacaacaagccgcccgcccttcgtcgacacacacacaacaccatcaagtgcaagcagaataaggacaagtccggcagtccacacaaaaaacaatctaaggataagccccagaacacattccccaccatgggcaatgacaaggacggtccgtggaaccaccactctccgcacaagcagcataagaaaaagaccgtccacagcatcagtccaacctgacagcagcgcaacaacccacaaacacgaagaagcaagcccagtgagcccgcaagcatctgcaagcacagcaagaccacaaaggaagggcatggaggccagcacatcaacaacatacaaccaaactagttaacaaaaaatatacaataactctaagataaaccatgtagacaccaacaattgagaagccaaaaggcaattcacaatctccccaaaaaggcaacaacaccatattagctccgcttaagtctccctggaaaaaacactcgcccatataccaactataccacaaccatccaaagaaaaaaagctgggcaaaacaacacccaa

SEQ ID NO: 92 - DNA, 888 bp, human metapneumo virus
atggaggtgaaagtagagaacattcgagcaatagacatgctcaaagcaagagtgaaaaatcgtgtggcacgtagcaaatgctttaaaaatgcttctttaatcctcataggaataactacactgagtatagctctcaatatctatctgatcataaactacacaatacaaaaaaccacatccgaatcagaacaccacaccagctcaccacccacagaacccaacaaggaagcttcaacaatctccacagacaacccagacatcaatccaagctcacagcatccaactcaacagtccacagaaaaccccacactcaaccccgcagcatcagcgagcccatcagaaacagaaccagcatcaacaccagacacaacaaaccgcctgtcctccgtagacaggtccacagcacaaccaagtgaaagcagaacaaagacaaaaccgacagtccacacaatcaacaacccaaacacagcttccagtacacaatccccaccacggacaacaacgaaggcaatccgcagagccaccactttccgcatgagcagcacaggaaaaagaccaaccacaacattagtccagtccgacagcagcaccacaacccaaaatcatgaagaaacaggttcagcgaacccacaggcgtctgcaagcacaatgcaaaactagcacaccaataatataaaaccaaattagttaacaaaaaatgcgagatagctctaaagcaaaacatgtaggtaccaacaatcaagaaaccaaaagacaactcacaatctccctaaaacagcaacgacaccatgtcagctttgctcaaatctctctgggagaaacttctacccacatactaacaacatcacaaccatctcaagaaaagaaactgggcaaaacagcatccaa

SEQ ID NO: 93 - DNA, 888 bp, human metapneumo virus
atggaggtgaaagtagagaacattcgagcaatagacatgctcaaagcaagagtgaaaaatcgtgtggcacgcagcaaatgctttaaaaatgcttctttaatcctcataggaataactacactgagtatagccctcaatatctatctgatcataaactacacaatacaaaaaaccacatctgaatcagaacaccacactagctcaccacccacagaatccaacaaagaaacttcaacaatccccatagacaacccagacatcaatccaaactcacagcatccaacccaacagtccacagaaagccccacactcaaccccgcagcctcggtgagcccatcagaaacagaaccagcatcaacaccagacacaacaaaccgcctgtcctccgtagacagatccacaacacaaccaagtgaaagcagaacaaagacaaaaccaacagtccacacaaaaaacaatccaagtacagtttccagaacacaatccccactacgggcaacaacgaaggcggtcctcagagccaccgctttccgcacgagcagcacaagaaaaagaccaaccacaacatcagtccagtctgacagcagcaccacaacccaaaatcatgaagaaacaagttcagcgaacccacaggcatctgcaagcacaatgcaaagccagcacaccaacaacataaaaccaaattagttaacaaaaaatacgagatagctctaaagtaaaacatgtaggtaccaacaatcaaggaatcaaaagacaactcacaatctccctaaaacagcaacaacatcatgtcagttttgctcaaatctccctgggagaaactttcgcccacatactaacaacatcacaaccatctcaagaaaagaaactgggcaaaacagcacccaa

SEQ ID NO: 94 - DNA, 888 bp, human metapneumo virus
atggaggtgaaagtagagaacatccgagcagtagacatgctcaaagcaagagtcaaaaatcgtgtggcacgcagcaaatgctttaaaaatgcctccttaatcctcgtaggaataactacactgagcatagccctcaatatctatctgatcgtaaactacacaatacaaaaaaccacatccgaatcagaacaccacaccagctcatcacccacagaatccaacaaaggaacttcaacaatccccacagacaacccagacatcaatccaaattcacaacatccaactcaacagtccacagaaagccccacactcaacaccgcagcctcggtgagcccatcagaaacagaaccagcatcaacaccagacacaacaaaccgcctgtcctccgcagacagatccacaacacaaccaagtgaaagcagaacaaagacaaagctgacagtccacacaaaaaacaacctaagtacagcctccagaacacaatcaccaccacgggcaacaacgaaggcggtcctcagagacaccgccttccacacgagcagcacaggaaaaagaccaaccacaacatcagtccagtctggcagcagcaccacaactcaaaatcatgaagaaacaagttcatcgaacccacaggcatctgcaagcacaatgcaagaccaggacaccaacaatacaaaacaaaattagttaacaaaaaatacaagatagctctaaagtaaaacatgtaggtaccaacagtaaagaaatcaaaagacaactcacaatctccccaaaacagcaacaacatcatgtcagcttcgctcaaatctccctgggagaaactctcgcccacatactaacaacatcacaactatctcaagaaaagaaactgggcaaaaaaacactcaa

SEQ ID NO: 95 - DNA, 887 bp, human metapneumo virus
atggaggtgaaagtagagaacatccgagcagtagacatgctcaaagcaagagttaaaaatcgtgtggcacgcagcaaatgctttaaaaatgcctctttaatcctcgtaggaataactacactgagtatagccctcaatatctatctgatcgtaaactacacaatacaaaaaaccacatccgaatcagaacaccacactagctcatcacccacagaatccaacaaaggaacttcaacaatcccacagacaacccagacatcaatccaaattcacaacatccaactcaacagtccacagaaagccccacactcaacaccgcagcctcggtgagcccatcagaaacagaaccagcatcaacaccagacacaacaaaccgcctgtcctccgcagacagatccacaacacaaccaagtgaaagcagaacaaagacaaagctgacagtccacacaaaaaacaacctaagtacagcctccagaacacaatcaccaccacgggcaacaacgaaggcggtcctcagagacaccgccttccacacgagcagcacaggaaaaagaccaaccacaacatcagtccagtctggcagcagcaccacaactcaaaatcatgaagaaacaagttcatcgaacccacaggcatctgcaagcacaatgcaagaccaggacaccaacaatacaaaacaaaattagttaacaaaaaatacaagatagctctaaagtaaaacatgtaggtaccaacagtaaagaaatcaaaagacaactcataatctccccaaaacagcaacaacatcatgtcagcttcgctcaaatctccctgggagaaactctcgcccacatactaacaacatcacaactatctcaagaaaagaaactgggcaaaaaaacactcaa

SEQ ID NO: 96 - DNA, 888 bp, human metapneumo virus
atggaggtgaaagtagagaacattcgagcaatagacatgctcaaagcaagaatgaaaaatcgtgtggcacgcagcaaatgctttaaaaatgcttctttaatcctcataggaataactactctgagtatagccctcaatatctatctgatcataaactacacaatacaaaaaaccacatctgaatcagaacaccacactagctcaccacccacagaatccaacaaagaaacttcaacaatccctatagacaacccagacatcaatccaaactcacagcatccaactcaacagtccacagaaagcctcacactcaaccccgcagcctcggtgagcccatcagaaacagaaccagcatcaacaccagacacaacaaaccgcctgtcctccgtagacagatccacaacacaaccaagtgaaagcagaacaaagacaaaactgacagtccacaaaaaaaacatcccaagtacagtctctagaacacaatcctcaatacgggcaacaacgaaggcggtcctcagagccaccgcctttcgcacgagcagcacaggagaaagaccaactacaacatcagtccagtctgacagcagcaccacaacccaaaatcatgaagaaacaggttcagcgaacccacaggcatctgcaagcacaatgcaaaactagcacaccaacattgtaaaaccaaattagttaacaaaaaatatgaaatagctctaaagtaaaacatgtaggtgctaacaatcaagaaatcaaaagacatctcataatctctccaaaacagcaacaacatcatgtcaactttgctcaaatctccctgggagaaactttcgcccccatactgacaacatcacaatcatctcaagaaaagaaactgggcaaaacagcaccaaa

SEQ ID NO: 97 - DNA, 888 bp, human metapneumo virus
atggaggtgaaagtagagaacattcgagcaatagacatgctcaaagcaagagtgaaaaatcgtgtggcacgcagcaaatgctttaaaaatgcttctttaatcctcataggaataactactctgagtatagccctcaacatctatctgatcataaactacacaatacaaaaaaccacatctgaatcagaacaccacactagctcaccacccacagaatctaacaaagaaacttcaacaatctctatagacaacccagacatcaatccaaactcacagcatccaactcaacagtccacagaaagcctcacactcagccccacagcctcggtgagcccatcagaaacagaaccagcatcaacatcagacacaacaagccgcctgtcttccgtagacagatccacaacacaaccaagtgaaagcagagcaaggacaaaaccgacagtccacaagaaaaacatcccaagtacagtttctagaacacaatccccactacgggcaacaacgaaggcggtcctcagagccaccgcctttcgcacgagcagcacaggagagggaccaaccacaacatcggtccagtctgacagcagcaccacaacccaaaatcatgaagaaacaggttcagcgaacccacaggcatctgcaagcacaatgcaaaactagcacaccaacattgtaaaaccaaattagttaacaaaaaatatgaaatagttctaaagtaaaacatgtaggtgctaacaatcaagaaatcaaaagacaactcataatctccctaaaacagcaacaacatcatgtcaactttgctcaaatctccctgggagaaactttcgcccccatactgacaacatcacaatcatctcaagaaaagaaactgggcaaaacagcaccaaa

SEQ ID NO: 98 - DNA, 888 bp, human metapneumo virus
atggaggtgaaagtagagaacattcgagcaatagacatgctcaaagcaagagtgaaaaatcgtgtggcacgtagcaaatgctttaaaaatgcttctttaatcctcataggaataactacactgagtatagctctcaatatctatctgatcataaactacacaatacaaaaaaccacatctgaatcagaacaccacaccagctcaccacccacagaatccaacaaggaagcttcaacaatctccacagacaatccagacatcaatccaaactcacagcatccaactcaacagtccacagaaaaccccacactaaaccccgcagcatcggtgagctcatcagaaacagaaccagcatcaacaccagacacaacaaaccgcctgtcctccgtagacaggtccacagcacaaccaagtgaaagcagaacaaagacaaaaccgacagtccacacaagaaacaacccaagcacagcttccagcacacaatccccaccacgggtaacaacgaaggcaatcctcagagccaccgtcttccgcatgagcagcacaggaaaaagaccagccacaacattagtccagtccgacagcagcaccacaacccaaaatcatgaagaaacaggttcagcaaactcacaggcatctgcaagcacaatgcaaaactagcactccaacaatataaaaccaaattagttaacaaaaaatacgagatagctctaaagtaaaacatgtaggcaccaacaatcaggaaattaaaagacaactcacaacctccctaaaacagcaacgacaccatgtcaactttgctcaaatctctctgggagaaacttttgcccacatactaacaacatcacaatcatctcaagaaaagaaactgggcaaaacagcatccaa

SEQ ID NO: 99 - DNA, 888 bp, human metapneumo virus
atggaggtgaaagtagagaacattcgagcaatagacatgctcaaagcaagagtgaaaaatcgtgtggcacgcagcaaatgctttaaaaatgcttctttaatcctcataggaataactactctgagtatagccctcaacatctatctgatcataaactacacaatacaaaaaaccacatctgaatcagaacaccacactagctcaccacccacagaatctaacaaagaaacttcaacaatctctatagacaactcagacatcaatccaaactcacagcatccaactcaacagtccacagaaagcctcacactcagccccacagcctcggtgagcccatcagaaacagaaccagcatcaacatcagacacaacaaaccgcctgtcttccgtagacagatccacaacacaaccaagtgaaagcagagcaagaacaaaaccgacagtccacaagaaaaacatcccaagtacagtttctagaacacaatccccactacgggcaacaacgaaggcggtcctcagagccaccgcctttcgcatgagcagcacaggagagggaccaaccacaacatcggtccagtctgacagcagcaccacaacccaaaatcatgaagaaacaggctcagcgaacccacaggcatctgcaagcacaatgcaaaaccagcacaccaacattgcaaaaccaaattagttaacaaaaaatatgaaatagttctaaagtaaaacatgtaggtgccaacaatcaagaaatcaaaagacaactcacaatctccctaaaacagcaacaacatcatgccaactttgctcaaatctccctgggagaaaccctcgcccccatactgacaacatcacaatcatctcaagaaaagaaactgggcaaaacagcaccaaa

SEQ ID NO: 100 - DNA, 888 bp, human metapneumo virus
atggaggtgaaagtagagaacattcgagcaatagacatgctcaaagcaagagtgaaaaatcgtgtggcacgcagcaaatgctttaaaaatgcttctttaatcctcataggaataactactctgagtatagccctcaatatctatctgatcataaactacacaatacaaaaaaccacatctgaatcagaacaccacactagctcaccacccacagaatctaacaaggaaacttcaacaatccctatagacaacccagacatcaatccaaactcacagcatccaactcaacagtccacagaaagcctcacactctaccccacatcctcggtgagctcatcagaaacagaaccagcatcaacaccaggcataacaaaccacctgtcctttgtagacagatccacaacacaaccaagtgaaagcagaacaaagacaaaccggacagtccacaaaaaaaacatctcaagtacagtttctagaacacagtccccaccacggacaacagcgaaggcggtccccagagccaccgcccttcgcacgagcagcacaggagaaagaccaaccacaacaccagtccagcccgatagcagcaccacaacacaaaatcatgaagaaacaggctcagcgaacccacaggcatccgcaagcacaatgcaaaaccagcacaccaacattgcaagaccaaattagttaacaaaaaatatgaaatagctctaaagtaaaacatgtaggtgccaacaatcaagaaatcaaaagataactcataatctctctaaaacatcaacaacatcatgttaactttgctcaaatctctctgggagaaaccttcgcccccatactggcaacatcacaatcatctcaagaaaagaaactgggcaaaacaacaccaaa

SEQ ID NO: 101 - DNA, 888 bp, human metapneumo virus
atggaggtgaaagtagagaacattcgagcaatagacatgctcaaagcaagagtgaaaaatcgtgtggcacgcagcaaatgctttaaaaatgcttctttaatcctcataggaataactactctgagtatagccctcaatatctatctgatcataaactacacaatacaaaaaaccacatctgaatcagaacaccacactagctcaccacccacagaatctaacaaggaaacttcaacaatccctatagacaacccagacatcaatccaaactcacagcatccaactcaacagtccgcagaaagcctcacactctaccccacatcctcggtgagctcatcagaaacagaaccagcatcaacaccaggcataacaaaccacctgtcctttgtagacagatccacaacacaaccaagtgaaagcagaacaaagacaaaccggacagtccacaaaaaaaacatctcaagtacagtttctagaacacagtccccaccacggacaacagcgaaggcggtccccagagccaccgcccttcgcacgagcagcacaggagaaagaccaaccacaacaccagtccagcccgatagcagcaccacaacacaaaatcatgaagaaacaggctcagcgaacccacaggcatccgcaagcacaatgcaaaaccagcacaccaacattgcaagaccaaattagttaacaaaaaatatgaaatagctctaaagtaaaacatgtaggtgccaacaatcaagaaatcaaaagataactcataatctctctaaaacatcaacaacatcatgttaactttgctcaaatctctctgggagaaaccttcgcccccatactggcaacatcacaatcatctcaagaaaagaaactgggcaaaacaacaccaaa

SEQ ID NO: 102 - DNA, 888 bp, human metapneumo virus
atggaggtgaaagtagagaatattcgagcaatagacatgctcaaagcaagagtgaaaaatcgtgtggcacgcagcaaatgctttaaaaatgcttctttaatcctcataggaataactactctgagtatagccctcaatatctatctgatcataaactacacaatacaaaaaaccacatctgaatcagaacaccacactagctcaccacccacagaatctaacaaggaaacttcaacaatccctatagacaacccagacatcaatccaaactcacagcatccaactcaacagtccacagaaagcctcacactctaccccacatcctcggtgagctcatcagaaacagaaccagcatcaacaccaggcataacaaaccacctgtcctttgtagacagatccacaacacaaccaagtgaaagcagaacaaagacaaaccggacagtccacaaaaaaaacatctcaagtacagtttctagaacacagtccccaccacggacaacagcgaaggcggtccccagagccaccgcccttcgcacgagcagcacaggagaaagaccaaccacaacaccagtccagcccgatagcagcaccacaacacaaaatcatgaagaaacaggctcagcgaacccacaggcatccgcaagcacaatgcaaaaccagcacaccaacattgcaagaccaaattagttaacaaaaaatatgaaatagctctaaagtaaaacatgtaggtgccaacaatcaagaaatcaaaagataactcataatctctctaaaacatcaacaacatcatgttaactttgctcaaatctctctgggagaaaccttcgcccccatactggcaacatcacaatcatctcaagaaaagaaactgggcaaaacaacacccaa

SEQ ID NO: 103 - DNA, 888 bp, human metapneumo virus
atggaggtgaaagtagagaacattcgagcaatagacatgctcaaagcaagagtgaaaaatcgtgtggcacgtagcaaatgctttaaaaatgcttctttaatcctcataggaataactacactgagcatagccctcaatatctatctgatcataaactacacaatacaacaaaccacatctgaatcagaacaccacaccagctcaccacccacagaatccaacaaggaagcttcaacaatctccacagacaacccagacatcaatccaaactcacagcatccaactcaacagtccacagaaaaccccacactcaacccagcagcatcagcgagcccatcagaaacagaatcagcatcaacaccagatacaacaaaccgcctgtcctccgtagacaggtccacggtacaaccaagtgaaaacagaacaaagacaaaactgacagtccacacaagaaacaacctaagcacagcctccagtacacaatccccaccacgggcaacaacgaaggcaatccgcagagccaccaccctccgcatgagcagcacaggaagaagaccaaccacaacactagtccagtccgacagcagcaccacaacccaaaatcatgaagaaacaggctcagcgaacccacaggcatctgcaagcacaatgcaaaaccagcacaccaacaatataaaaccaaattagttaacaaaaaatacgagatagctctaaagtaaaacatgtaggcaccaacaatcaagaaaccaaaagataactcacaatccccccaaaacagcaacgacaccatgtcagctttgctcaaatctctctgggagaaacttttgcccacatactaacaacatcacaaccatctcaagaaaagaaactgggcaaaacagcatccaa

SEQ ID NO: 104 - DNA, 888 bp, human metapneumo virus
atggaggtgaaagtagagaacattcgagcaatagacatgctcaaagcaagagtgaaaaatcgtgtggcacgtagcaaatgctttaaaaatgcttctttaatcctcataggaataactacactgagcatagccctcaatatctatctgatcataaactacacaatacaaaaaaccacatctgaatcagaacaccacaccagctcaccacccacagaatccaacaaggaagcttcaacaatctccacagacaacccagacatcaatccaaactcacagcatccaactcaacagtccacagaaaaccccacactcaacccagcagcatcagcgagcccatcagaaacagaatcagcatcaacaccagatacaacaaaccgcctgtcctccgtagacaggtccacggtacaaccaagtgaaaacagaacaaagacaaaactgacagtccacacaagaaacaacctaagcacagcctccagtacacaatccccaccacgggcaacaacgaaggcaatccgcagagccaccaccctccgcatgagcagcacaggaagaagaccaaccacaacactagtccagtccgacagcagcaccacaacccaaaatcatgaagaaacaggctcagcgaacccacaggcatctgcaagcacaatgcaaaaccagcacaccaacaatataaaaccaaattagttaacaaaaaatacgagatagctctaaagtaaaacatgtaggcaccaacaatcaagaaaccaaaagataactcacaatccccccaaaacagcaacgacaccatgtcagctttgctcaaatctctctgggagaaacttttgcccacatactaacaacatcacaaccatctcaagaaaagaaactgggcaaaacagcatccaa

SEQ ID NO: 105 - DNA, 901 bp, human metapneumo virus
atggaagtaagagtggagaacattcgagcgatagacatgttcaaagcaaagataaaaaaccgtataagaagcagcaggtgctatagaaatgctacactgatccttattggactaacagcgttaagcatggcacttaatattttcctgatcatcgatcatgcaacattaagaaacatgatcaaaacagaaaactgtgctaacatgccgtcggcagaaccaagcaaaaagaccccaatgacctccacagcaggcccaaacaccaaacccaatccacagcaagcaacacagtggaccacagagaactcaacatccccagtagcaaccccagagggccatccatacacagggacaactcaaacatcagacacaacagctccccagcaaaccacagacaaacacacagcaccgctaaaatcaaccaatgaacagatcacccagacaaccacagagaaaaagacaatcagagcaacaacccaaaaaagggaaaaaggaaaagaaaacacaaaccaaaccacaagcacagctgcaacccaaacaaccaacaccaccaaccaaatcagaaatgcaagtgagacaatcacaacatccgacagacccagaactgacaccacaacccaaagcagcgaacagacaacccgggcaacagacccaagctccccaccacaccatgcatagagaggtgcaaaactcaaatgagcacaacacacaaacatcccatccaagtagttaacaaaaaaccacaaaataaccttgaaaaccaaaaaaccaaaacataaacccagacccagaaaaacatagacaccatatggaaggttctagcatatgcaccaatgagatggcatctgttcatgtatcaatagcaccaccatcattcaaggaataagaagaggcgaaaatttaa

SEQ ID NO: 106 - DNA, 901 bp, human metapneumo virus
atggaagtaagagtggagaacattcgagcgatagacatgttcaaagcaaagataaagaaccgtataagaagcagcaggtgctatagaaatgctacactgatccttattggactaacagcgttaagcatggcacttaatattttcctgatcattgatcatgcaacattaagaaacatgatcaaaacagaaaactgtgctaacatgccatcggcagaaccaagcaaaaagaccccaatgacctccacagcaggcccaagcaccgaacccaatccacagcaagcaacacaatggaccacagagaactcaacatccccagcagcaaccctagagagccatccatacacagggacaacccaaacaccagacataacagctccccaacaaaccacagacaaacacacagcactgccaaaatcaaccaatgaacagatcacccagacaaccacagagaaaaagacaaccagagcaacaacccaaaaaagggaaaaagaaaaagaaaacacaaaccaaaccacaagcacagctgcaacccaaacaaccaacaccaccaaccaaaccagaaatgcaagtgagacaatcacaacatccgacagacccagaattgacaccacaacccaaagcagcgatcagacaacccgggcaacagacccaagctccccaccacaccatgcacagagtggtgcaaaacccaaatgaacacaacacacaaacatctcatccaagtagttaacaaaaaaccacaaaataaccttgaaaaccaaaaaaccaaaccacaaacttagacccagaaaaacatagacactatatggaaggtttgagcatatgcaccaatgaaatggtatctgttcatgtatcaatagcgccaccattatttaaggaataagaagaggcaaaaattcaa

SEQ ID NO: 107 - DNA, 860 bp, human metapneumo virus
atggaagtaagagtggagaacattcgagcgatagacatgttcaaagcaaagataaaaaaccgtataagaagcagcaggtgctatagaaatgctacactgatccttattggactaacagcgttaagcatggcacttaatattttcctgatcatcgatcatgcaacattaagaaacatgatcaaaacagaaaattgtgctaacatgccgccggcagaaccaagcaaaaagaccccaatgacctctacagcaggcccaaacaccaaacccaatccacagcaagcaacacagtggaccacggagaactcaacattcccagcagcaacctcagagggccatctacacacagggacaactcaaacaccagacacaacagctcctcagcaaaccacagacaaacacacagcactgccaaaatcaaccaatgaacaaatcacccagacaaccacagagaaaaagacaaccagagcaacaacccaaagaagggaaaaagggaaagaaaacacaaaccaaaccacaagcacagctgctacccaaacaaccaacaccaccaaccaaatcagaaatgcaagcgagacaatcacaacatccgacagacccagaactgactccacaacccaaagcagcgaacagacaacccgggcaacagacccaagctccccaccacatcatgcacagggaagtgcaaaacccaaatgaacacaacacacaaacatcccatccaagtagttaacaaaaaatcagacccagaaaaacatagacactatatggaaggtccgagcatatgcaccgatgaaatggcatttgttcatgtatcaatagcgccaccattatttaaggaataagaagaggcaaaaattcaa

SEQ ID NO: 108 - DNA, 861 bp, human metapneumo virus
atggaagtaagagtggagaacattcgagcgatagacatgttcaaagcaaagataaaaaaccgtataagaagcagcaggtgctatagaaatgctacactgatccttattggactaacagcgttaagcatggcacttaatattttcctgatcatcgatcatgcaacattaagaaacatgatcaaaacagaaaattgtgctaacatgccgccggcagaaccaagcagaaagaccccaatgacctccacagcaggcccaaacaccaaacccaatccacagcaagcaacacagtggaccacggagaactcaacatccccagcagcaaccccagagggccatctacacacagggacaactcaaacaccagacacaacagctcctcagcaaaccacagacaaacacacagcactgccaaaatcaaccaatgaacagatcacccaggcaaccacagagaaaaagacaaccagagaaacaacccaaagaagggaaaaaggaaaagaaaacacaaaccaaaccacaagcacagctgcaacccaaacaaccaacaccaccaaccaaatcagaaatgcaagcgagacaatcacaacatccgacagacccagaactgactccacaacccaaagcagcgaacagacaacccaggcaacagacccaagctccccagcacaccatgcacagggaagtgcaaaacccaaatgaacacaacacacaaacatcccatccaagtagttaacaaaaaaatcagacccagaaaaacacagacactatatggaaggtccgagcatatgcaccgatgaaatggcatctgttcatgtatcaatagcaccaccattatttaaggaataagaagaggcaaaaattcaa

SEQ ID NO: 109 - DNA, 860 bp, human metapneumo virus
atggaagtaagagtggagaacattcgagcgatagacatgttcaaagcaaagataaaaaaccgtataagaagcagcaggtgctatagaaatgctacattgatccttattggactaacagcgttaagcatggcacttaatattttcctgatcatcgatcatgcaacattaagaaacatgatcaaaacagaaaattgtgctaacatgccaccggcagaaccaagcaaaaagaccccaatgacctccacagcaggcctaaacactaaacccaatccacagcaagcaacacagtggaccacggagaactcaacatccccagcagcaaccccagagggccatctacacacagggacaactcaaacaccagacacaacagctcctcagcaaaccacagacaagcacacagcactgccaaaatcaaccaatgaacagatcacccagacaaccacagagaaaaagacaaccagagcaacaacccaaagaagggaaaaaggaaaagaaaacacaaaccaaaccacaagcacagctgcaacccaaacaaccaacaccaccaaccaaatcagaaatgcaagcgagacaatcacaacatccgacagacccagaactgactccacaacccaaagcagcgaacagacaacccgggcaacagacccaagctccccaccacaccatgcacagggaagtgcaaaacccaaatgaacacaacacacaaacatcccatccaagtagttaacaaaaaatcagacccagaaaaacatagacactatatggaaggtccgagcatatgcaccgatgaaatggcatctgttcatgtatcaatagcgccaccattatttaaggaataagaagaggcaaaaattcaa

SEQ ID NO: 110 - DNA, 860 bp, human metapneumo virus
atggaagtaagagtggagaacattcgagcgatagacatgttcaaagcaaagataaaaaaccgtataagaagcagcaggtgctatagaaatgctacactgatccttattggactaacagcgttaagcatggcacttaatattttcctgatcatcgatcatgcaacattaagaaacatgatcaaaacagaaaattgtgctaacatgccgccggcagaaccaagcaaaaagaccccaatgacctccacagcaggcccaaacaccaaacccaatccacagcaagcaacacagtggaccacggagaactcaacatccccagcagcaaccccagagggccatctacacacagggacaactcaaacaccagacacaacagctcctcagcaaaccacagacaaacacacagcactgccaaaatcaaccaatgaacagatcacccagacaaccacagagaaaaagacaaccagagcaacaacccaaagaagggaaaaaggaaaagaaaacacaaaccaaaccacaagcacagctgcaacccaaacaaccaacaccaccaaccaaatcagaaatgcaattgagacaatcacaacatccgacagacccagaactgactccacaacccaaagcagcgaacagacaacccgggcaacagacccaagctcccacccacaccatgcacagggaagtgcaaaacccaaatgaacacaacacacaaacatcccatccaagtagttaacaaaaaatcagacccagaaaaacatagacactatatggaaggtccgagcatatgcaccgatgaaatggcatctgttcatgtatcaatagcgccaccattatttaaggaataagaagaggcaagaattcaa

SEQ ID NO: 111 - DNA, 886 bp, human metapneumo virus
atggaagtaagagtggagaacattcgggcaatagacatgttcaaagcaaaaatgaaaaaccgtataagaagtagcaagtgctatagaaatgctacactgatccttattggattaacagcattaagtatggcacttaatatttttttaatcattgattatgcaatgttaaaaaacatgaccaaagtggaacactgtgttaatatgccgccggtagaaccaagcaagaagaccccaatgacctctgcagtagacttaaacaccaaacccaatccacagcaggcaacacagttggccgcagaggattcaacatctctagcagcaacctcagaggaccatctacacacagggacaactccaacaccagatgcaacagtctctcagcaaaccacagacgagtacacaacattgctgagatcaaccaacagacagaccacccaaacaaccacagagaaaaagccaaccggagcaacaaccaaaaaagaaaccacaactcgaactacaagcacagctgcaacccaaacactcaacactaccaaccaaactagctatgtgagagaggcaaccacaacatccgccagatccagaaacagtgccacaactcaaagcagcgaccaaacaacccaggcagcagacccaagctcccaaccacaccatacacagaaaagcacaacaacaacatacaacacagacacatcctctccaagtagttaacaaaaaaactataaaataatcatgaaaaccgaaaaactagaaaagttaatttgaactcagaaaagaacacaaacactatatgaattgtttgagcgtatatactaatgaaatagcatctgtttgtgcatcaataataccatcattatttaagaaataagaagaagctaaaattcaa

SEQ ID NO: 112 - DNA, 889 bp, human metapneumo virus
atggaagtaagagtggagaacattcggacaatagacatgttcaaagcaaagatgaaaaaccgtataagaagcagcaagtgctatagaaatgctacactgatccttattggactgacagcattaagtatggcacttaatattttcttgatcatcgattatgcaacatttaaaaacatgaccaaagtggaacactgtgctaatatgccgccggtagaaccgagtaagaagaccccaatgacctctacagtagactcaagcaccggacccaatccacagcagacaacacagtggaccacagaggattcaacatctctagcagcaacctcagaggaccatctacacacagggacaactccaacactagatgcaacagtttctcagcaaaccccagacaagcacacaacaccgctgagatcaaccaatggacagaccacccagacaaccacagagaaaaagccaaccagagcaatagccaaaaaagaaaccacaaaccaaaccacaagcacagctgcaacccaaacattcaacaccaccaatcaaaccagaaatggaagagagacaaccataacatctgccagatccagaaacgacgccacaactcaaagcagcgaacaaacaaaccagacaacagacccaagctcccaaccacatcatgcatagataagcacaataacaatatgaacacaacacagacacatcttctccaagtagttaacaaaaaactataaaataaccatgaaaaccaaaaaactagaaaagtaaatttgaactcagaaaagaacacaaacactaaatgaattgtttgagcatatatactaatgaaatagcatctgttcatgcatcaataataccatcattacttaagaaataagaagaagcaaaaattcaa

SEQ ID NO: 113 - DNA, 885 bp, human metapneumo virus
atggaagtaagagtggagaacattcgggcaatagacatgttcaaagcaaagatgaaaaaccgtataagaagtagcaagtgctatagaaatgctacactgatccttattggattaacagcattaagtatggcacttaatatttttttaatcattgattatgcaatgttaaaaaacatgaccaaagtggaacactgtgttaatatgccgccggtagaaccaagcaagaagaccccaatgacctctgcagtagacttaaacaccaaactcaatccacagcaggcaacacagttgaccacagaggattcaacatctctagcagcaacctcggaggatcatttactcacagggacaactccaacaccagatgcaacagtctctcagcaaaccacagacgagcacacaacactgctgagatcaaccaacagacagaccacccaaacaaccacagagaaaaagccaaccggagcaacaaccaaaaaagaaaccacaactcgaaccacaagcacagctgcaacccaaacactcaacaccaccaaccaaactagcaatggaagagaggcaaccacaacatccaccagatccagaaacggtgccacaactcaaaacagcgatcaaacaacctagacagcagacccaagctcccaaccacaccatacacagaaaagcacaacaacaacatacaacacagacacatcttctccaagtagttaacaaaaaactataaaataaccatgaaaactaaaaaactagaaaagttaatttgaactcagaaaagaacacaaacactatatgaattgtttgagcgtatatactaatgaaatagcatctgtttgtgcatcaataataccatcattatttaagaaataagaagaagctaaaattcaa

SEQ ID NO: 114 - DNA, 885 bp, human metapneumo virus
atggaagtaagagtggagaacattcgggcaatagacatgttcaaagcaaagatgaaaaaccgcataagaagtagcaagtgctatagaaatgctacactgatccttattggattaacagcattaagtatggcacttaatatttttttaatcattgattatgcaacattaaaaaacatgaccaaagtggaacactgtgttaatatgccgccggtagaaccaagcaagaagaccccaatgacctctgcagtagacttaaacaccaaactcaatccacagcaggcaacacagttgaccacagaggattcaacatctctagcagcaacctcagagggccatccacacacaggaacaactccaacaccagacgcaacagtctctcagcaaaccacagacgagcacacaacactgctgagatcaaccaacagacagaccacccaaacagccacagagaaaaagccaactggagcaacaaccaaaaaagaaaccacaacccgaactacaagtacagctgcaacccaaacacccaacaccaccaaccaaaccagcaatggaagagaggcaaccacaacatccgccaggtccagaaacggtgccacaactcaaaacagcgatcaaataacccaggcagcagactcaagctcccaaccacaccatacacagaaaagcacaacaacagcatacaacacagacacatcttttccaagtagttaacaaaaaactataaaataaccatgaaaaccaaaaaactagaaaagttaatttgaactcagaaaagaacacaaacactatatgaattgtttgagcgtatatactaatgaaatagcatctgtttgtgcatcaataataccatcattatttaagaaataagaagaagctaaaattcaa

SEQ ID NO: 115 - DNA, 886 bp, human metapneumo virus
atggaagtaagagtggagaacattcgggcaatagacatgttcaaagcaaagatgaaaaaccgtataagaagtagcaagtgctatagaaatgctacactgatccttattggattaacagcactaagtatggcacttaatatttttttaatcattgattatgcaacattaaaaaacatgaccaaagtggaacactgtgttaatatgccgccggtagaaccaagcaagaagaccccaatgacctctgcagtagactcaaacaccaaacccaatccacagcaggcaacacagttgaccacagaggattctacatctttagcagcaaccctagaggaccatccacacacagggacaactccaacaccagatgcaacagtctctcagcaaaccacagacgagcacacaacactgctgagatcaaccaacagacagaccacccaaacaactgcagagaaaaagccaaccagggcaacaaccaaaaaagaaaccacaactcgaaccacaagcacagctgcaacccaaacactcaacaccaccaaccaaactagcaatggaagagaggcaaccacaacatctgccagatccagaaacaatgccacaactcaaagcagcgatcaaacaacccaggcagcagaaccaagctcccaatcacaacatacacagaaaagcacaacaacaacatacaacacagacacatcttctctaagtagttaacaaaaaaactataaaataaccatgaaaaccaaaaaactagaaaagttaatttgaactcagaaaagaacacaaacactatatgaattatttgagcgtatatactaatgaaatagcatctgtttgtgcatcaataataccatcattatttaagaaataagaagaagctaaaattcaa

SEQ ID NO: 116 - DNA, 887 bp, human metapneumo virus
atggaagtaagagtggagaacattcgggcaatagacatgttcaaagcaaagatgaaaaaccgtataagaagtagcaagtgctatagaaatgctacactgatccttattggattatcagcactaagtatggcacttaatatttttttaatcattgattatgcaaaatcaaaaaacatgaccagagtggaacactgtgtcaatatgccgccggtagaaccaagcaagaagaccccaatgacctctgcagtagacttaaacaccaaacccaatccacagcgggcaacacagttgaccacagaggattcaacatctctagcagcaaccctagagggccatctacacacagggacaactccaacaccagatgtaacagtctctcagcaaaccacagacgagcacacaacactgctgagatcaaccaacagacagaccacccaaacagccgcagagaaaaagccaaccagagtaacaactaacaaagaaaccataactcgaaccacaagcacagccgcaacccaaacactcaacaccaccaaccaaaccaacaatggaagagaggcaaccacaacatctgccagatccagaaacaatgccacaactcaaagcagcgaccaaacaacccaggcagcagacccaagctcccaatcacaacatacacagaaaagcataacaacaacatacaacacagacacatcttctccaagtagttaacaaaaaaactataaaataaccatgaaaaccaaaaaaactagaaaagttaatttgaactcagaaaagaacacaaacactatatgaattgtttgagcgtatatactaatgaaatagcatctgtttgtgcatcaataataccatcattatttaagaattaagaagaagctaaaattcaa

SEQ ID NO: 117 - DNA, 887 bp, human metapneumo virus
atggaagtaagagtggagaacattcgggcaatagacatgttcaaagcaaagatgaaaaaccgtataagaagtagcaagtgctatagaaatgctacactgatccttattggattatcagcactaagtatggcacttaatatttttttaatcattgattatgcaaaatcaaaaaccatgaccagagtggaacactgtgttaatatgccgccggtagaaccaagcaagaagaccccaatgacctctgcagtagacttaaacaccaaacccaatccacagcaggcaacacagttgaccacagaggattcaacatctccagcagcaaccctagagggccatctacacacagggacaactccaacaccagatgcaacagtctctcagcaaaccacagacgagcacacaacactgctgagatcaaccaacagacagaccacccaaacaaccgcagagaaaaagccaaccagagcaacaaccaaaaaagaaaccataactcgaaccacaagcacagctgcaacccaaacactcaacaccaccaaccaaaccagcaatggaagagaggcaaccacaacatctgccagatccagaaacaatgccacaactcaaagcagcgaccaaacaacccaggcagcagacccaagctcccaatcacaacatacaaagaaaagcacaacaacaacatacaacacagacacatcttctccaagtagttaacaaaaaaactataaaataaccatgaaaaccaaaaaaactagaaaagttaatttgaactcagaaaagaacacaaacactatatgaattgtttgagcgtatatactaatgaaatagcatctgtttgtgcatcaataataccatcattatttaagaattaagaagaagctaaaattcaa

SEQ ID NO: 118 - DNA, 886 bp, human metapneumo virus
atggaagtaagagtggagaacattcgggcaatagacatgttcaaagcaaagatgaaaaaccgtataagaagtagcaagtgctatagaaatgctacactgatccttattggattaacagcactaagtatggcacttaatatttttttaatcattgattatgcaacattaaaaaacatgaccaaagtggaacactgtgttaatatgccgccggtagaaccaagcaagaagaccccaatgacctctgcagtagacttaaacaccaaacccaatccacagcaggcaacacagttgaccacagaggactctacatctttagcagcaaccctagaggaccatccacacacagggacaactccaacaccagatgcaacagtctctcagcaaaccacagacgagcacacaacactgctgagatcaaccaacagacagaccacccaaacaactgcagagaaaaagccaaccagagcaacaaccaaaaaagaaaccacaactcgaaccacaagcacagctgcaacccaaacactcaacaccaccaaccaaactagcaatggaagagaggcaaccacaacatctgccagatccagaaacaatgccacaactcaaagcagcgatcaaacaacccaagcagcagaaccaaactcccaatcacaacatacacagaaaagcacaacaacaacatacaacacagacacatcttctctaagtagttaacaaaaaaactataaaataaccatgaaaaccaaaaaactagaaaagttaatttgaactcagaaaggaacacaaacactatatgaattatttgagcgtatatactaatgaaatagcatctgtttgtgcatcaataataccatcattatttaagaaataagaagaagctaaaattcaa

SEQ ID NO: 119 - protein, 236 aa, human metapneumo virus
MEVKVENIRTIDMLKARVKNRVARSKCFKNASLVLIGITTLSIALNIYLIINYKMQKNTSESEHHTSSSPMESSRETPTVPTDNSDTNSSPQHPTQQSTEGSTLYFAASASSPETEPTSTPDTTNRPPFVDTHTTPPSASRTKTSPAVHTKNNPRTSSRTHSPPRATTRTARRTTTLRTSSTRKRPSTASVQPDISATTHKNEEASPASPQTSASTTRIQRKSVEANTSTTYNQTS

SEQ ID NO: 120 - protein, 236 aa, human metapneumo virus
MEVKVENIRTIDMLKASVKNRVARSKCFKNASLVLIGITTLSIALNIYLIINYKMQKNTSESEHHTSSSPMESSRETPTVPTDNSDTNSSPQHPTQQSTEGSTLYFAASASSPETEPTSTPDTTNRPPFVDTHTTPPSASRTKTSPAVHTKNNPRTSSRTHSPPRATTRTARRTTTLRTSSTRKRPSTASVQPDISATTHKNEEASPASPQTSASTTRIQRKSVEANTSTTYNQTS

SEQ ID NO: 121 - protein, 236 aa, human metapneumo virus
MEVKVENIRTIDMLKARVKNRVARSKCFKNASLVLIGITTLSIALNIYLIINYKMQKNTSESEHHTSSSPMESSRETPTVPTDNSDTNSSPQHPTQQSTEGSTLYFAASANSPETEPTSTPDTTNRPPFVDTHTTPPSASRTKTSPAVHTKNNPRISSRTHSPPWATTRTARRTTTLRTSSTRKRPSTASAQPDISATTHKNEEASPASPQTSASTTRTQRKSVEANTSTTYNQTS

SEQ ID NO: 122 - protein, 236 aa, human metapneumo virus
MEVKVENIRTIDMLKARVKNRVARSKCFKNASLVLIGITTLSIALNIYLIINYKMQKNTSESEHHTSSSPMESSRETPTVPTDNSDTNSSPQHPTQQSTEGSTLYFAASANSPETEPTSTPDTTDRPPFVDTHTTPPSASRTKTSPAVHTKNNPRISSRTHSPPWATTRTARRTTTLRTSSTRKRPSTASVQPDISATTHKNEEASPASPQTSASTTRTQRKSVEANTSTTYNQTS

SEQ ID NO: 123 - protein, 236 aa, human metapneumo virus
MEVKVENIRTIDMLKARVKNRVARSKCFKNASLVLIGITTLSIALNIYLIINYKMQKNTSESEHHTSSSPMESSRETPTVPTDNSDTNSSPQHPTQQSTEGSTLYFAASASSPETEPTSTPDTTDRPPFVDTHTTPPSASRTKTSPAVHTKNNPRISSRTHSPPWATTRTARRTTTLRTSSTRKRPSTASVQPDISATTHKNEEASPASPQTSASTTRTQRKSVEANTSTTYNQTS

SEQ ID NO: 124 - protein, 236 aa, human metapneumo virus
MEVKVENIRTIDMLKARVKNRVARSKCFKNASLILIGITTLSIALNIYLIINYTMQENTSESEHHTSSSPMESSRETPTVPIDNSDTNPGSQYPTQQSTEDSTLHSAASASSPETEPTSTPDTTSRPPFVDTHTTPPSASRTRTSPAVHTKNNPRVSPRTHSPPWAMTRTVRGTTTLRTSSTRKRLSTASVQPDSSATTHKHEETSPVSPQTSASTARPQRKGMEASTSTTYNQTS

SEQ ID NO: 125 - protein, 236 aa, human metapneumo virus
MEVKVENIRTIDMLKARVKNRVARSKCFKNASLILIGITTLSIALNIYLIINYTMQENTSESEHHTSSSPMESSRETPTVPMDNSDTNPGSQYPTQQSTEGSTLHFAASASSPETEPTSTPDTTSRPPFVDTHTTPSSASRTKTSPAVHTKNNLRISPRTHSPPWAMTRTVRGTTTLRTSSIRKRPSTASVQPDSSATTHKHEEASPVSPQASASTARPQRKGMEASTSTTYNQTS

SEQ ID NO: 126 - protein, 236 aa, human metapneumo virus
MEVKVENIRTIDMLKARVKNRVARSKCFKNASLILIGITTLSIALNIYLIINYTMQENTSESEHHTSSSPMESSRETPTVPMDNSDTNPGSQYPTQQSTEGSTLHFAASASSPETEPTSTPDTTSRPPFVDTHTTPSSASRIRTSPAVHTKNNLRISPRTHSPPWAMTRTVRGTTTLRTSSIRKRPSTASVQPDSSATTHKHEEASPVSPQASASTARPQRKGMEASTSTTYNQTS

SEQ ID NO: 127 - protein, 228 aa, Human metapneumo virus
  VARIANT 220: Xaa = unknown amino acid or other
MEVKVENIRAIDMLKARVKNRVARSKCFKNASLILIGITTLSIALNIYLIINYTIQKTTSESEHHTSSPPTEPNKEASTISTDNPDINPSSQHPTQQSTENPTLNPAASASPSETEPASTPDTTNRLSSVDRSTAQPSESRTKTKPTVHTINNPNTASSTQSPPRTTTKAIRRATTFRMSSTGKRPTTTLVQSDSSTTTQNHEETGSANPQASASTMQNXHTNNIKPN

SEQ ID NO: 128 - protein, 228 aa, human metapneumo virus
MEVKVENIRAIDMLKARVKNRVARSKCFKNASLILIGITTLSIALNIYLIINYTIQKTTSESEHHTSSPPTESNKETSTIPIDNPDINPNSQHPTQQSTESPTLNPAASVSPSETEPASTPDTTNRLSSVDRSTTQPSESRTKTKPTVHTKNNPSTVSRTQSPLRATTKAVLRATAFRTSSTRKRPTTTSVQSDSSTTTQNHEETSSANPQASASTMQSQHTNNIKPN

SEQ ID NO: 129 - protein, 228 aa, human metapneumo virus
MEVKVENIRAVDMLKARVKNRVARSKCFKNASLILVGITTLSIALNIYLIVNYTIQKTTSESEHHTSSSPTESNKGTSTIPTDNPDINPNSQHPTQQSTESPTLNTAASVSPSETEPASTPDTTNRLSSADRSTTQPSESRTKTKLTVHTKNNLSTASRTQSPPRATTKAVLRDTAFHTSSTGKRPTTTSVQSGSSTTTQNHEETSSSNPQASASTMQDQDTNNTKQN

SEQ ID NO: 130 - protein, 228 aa, human metapneumo virus
  VARIANT 81: Xaa = Any Amino Acid
MEVKVENIRAVDMLKARVKNRVARSKCFKNASLILVGITTLSIALNIYLIVNYTIQKTTSESEHHTSSSPTESNKGTSTIXTDNPDINPNSQHPTQQSTESPTLNTAASVSPSETEPASTPDTTNRLSSADRSTTQPSESRTKTKLTVHTKNNLSTASRTQSPPRATTKAVLRDTAFHTSSTGKRPTTTSVQSGSSTTTQNHEETSSSNPQASASTMQDQDTNNTKQN

SEQ ID NO: 131 - protein, 228 aa, Human metapneumo virus
  VARIANT 220: Xaa = unknown amino acid or other
MEVKVENIRAIDMLKARMKNRVARSKCFKNASLILIGITTLSIALNIYLIINYTIQKTTSESEHHTSSPPTESNKETSTIPIDNPDINPNSQHPTQQSTESLTLNPAASVSPSETEPASTPDTTNRLSSVDRSTTQPSESRTKTKLTVHKKNIPSTVSRTQSSIRATTKAVLRATAFRTSSTGERPTTTSVQSDSSTTTQNHEETGSANPQASASTMQNXHTNIVKPN

SEQ ID NO: 132 - protein, 228 aa, Human metapneumovirus
  VARIANT 220: Xaa = unknown amino acid or other
MEVKVENIRAIDMLKARVKNRVARSKCFKNASLILIGITTLSIALNIYLIINYTIQKTTSESEHHTSSPPTESNKETSTISIDNPDINPNSQHPTQQSTESLTLSPTASVSPSETEPASTSDTTSRLSSVDRSTTQPSESRARTKPTVHKKNIPSTVSRTQSPLRATTKAVLRATAFRTSSTGEGPTTTSVQSDSSTTTQNHEETGSANPQASASTMQNXHTNIVKPN

SEQ ID NO: 133 - protein, 228 aa, Human metapneumovirus
  VARIANT 220: Xaa = unknown amino acid or other
MEVKVENIRAIDMLKARVKNRVARSKCFKNASLILIGITTLSIALNIYLIINYTIQKTTSESEHHTSSPPTESNKEASTISTDNPDINPNSQHPTQQSTENPTLNPAASVSSSETEPASTPDTTNRLSSVDRSTAQPSESRTKTKPTVHTRNNPSTASSTQSPPRVTTKAILRATVFRMSSTGKRPATTLVQSDSSTTTQNHEETGSANSQASASTMQNXHSNNIKPN

SEQ ID NO: 134 - protein, 228 aa, human metapneumo virus
MEVKVENIRAIDMLKARVKNRVARSKCFKNASLILIGITTLSIALNIYLIINYTIQKTTSESEHHTSSPPTESNKETSTISIDNSDINPNSQHPTQQSTESLTLSPTASVSPSETEPASTSDTTNRLSSVDRSTTQPSESRARTKPTVHKKNIPSTVSRTQSPLRATTKAVLRATAFRMSSTGEGPTTTSVQSDSSTTTQNHEETGSANPQASASTMQNQHTNIAKPN

SEQ ID NO: 135 - protein, 228 aa, human metapneumo virus
MEVKVENIRAIDMLKARVKNRVARSKCFKNASLILIGITTLSIALNIYLIINYTIQKTTSESEHHTSSPPTESNKETSTIPIDNPDINPNSQHPTQQSTESLTLYPTSSVSSSETEPASTPGITNHLSFVDRSTTQPSESRTKTNRTVHKKNISSTVSRTQSPPRTTAKAVPRATALRTSSTGERPTTTPVQPDSSTTTQNHEETGSANPQASASTMQNQHTNIARPN

SEQ ID NO: 136 - protein, 228 aa, human metapneumo virus
MEVKVENIRAIDMLKARVKNRVARSKCFKNASLILIGITTLSIALNIYLIINYTIQKTTSESEHHTSSPPTESNKETSTIPIDNPDINPNSQHPTQQSAESLTLYPTSSVSSSETEPASTPGITNHLSFVDRSTTQPSESRTKTNRTVHKKNISSTVSRTQSPPRTTAKAVPRATALRTSSTGERPTTTPVQPDSSTTTQNHEETGSANPQASASTMQNQHTNIARPN

SEQ ID NO: 137 - protein, 228 aa, human metapneumo virus; identical to SEQ ID NO: 135

SEQ ID NO: 138 - protein, 228 aa, human metapneumo virus
MEVKVENIRAIDMLKARVKNRVARSKCFKNASLILIGITTLSIALNIYLIINYTIQQTTSESEHHTSSPPTESNKEASTISTDNPDINPNSQHPTQQSTENPTLNPAASASPSETESASTPDTTNRLSSVDRSTVQPSENRTKTKLTVHTRNNLSTASSTQSPPRATTKAIRRATTLRMSSTGRRPTTTLVQSDSSTTTQNHEETGSANPQASASTMQNQHTNNIKPN

SEQ ID NO: 139 - protein, 228 aa, human metapneumo virus
MEVKVENIRAIDMLKARVKNRVARSKCFKNASLILIGITTLSIALNIYLIINYTIQKTTSESEHHTSSPPTESNKEASTISTDNPDINPNSQHPTQQSTENPTLNPAASASPSETESASTPDTTNRLSSVDRSTVQPSENRTKTKLTVHTRNNLSTASSTQSPPRATTKAIRRATTLRMSSTGRRPTTTLVQSDSSTTTQNHEETGSANPQASASTMQNQHTNNIKPN

SEQ ID NO: 140 - protein, 231 aa, Human metapneumo virus
  VARIANT 225: Xaa = unknown amino acid or other
MEVRVENIRAIDMFKAKIKNRIRSSRCYRNATLILIGLTALSMALNIFLIIDHATLRNMIKTENCANMPSAEPSKKTPMTSTAGPNTKPNPQQATQWTTENSTSPVATPEGHPYTGTTQTSDTTAPQQTTDKHTAPLKSTNEQITQTTTEKKTIRATTQKREKGKENTNQTTSTAATQTTNTTNQIRNASETITTSDRPRTDTTTQSSEQTTRATDPSSPPHHAXRGAKLK

SEQ ID NO: 141 - protein, 231 aa, human metapneumo virus
MEVRVENIRAIDMFKAKIKNRIRSSRCYRNATLILIGLTALSMALNIFLIIDHATLRNMIKTENCANMPSAEPSKKTPMTSTAGPSTEPNPQQATQWTTENSTSPAATLESHPYTGTTQTPDITAPQQTTDKHTALPKSTNEQITQTTTEKKTTRATTQKREKEKENTNQTTSTAATQTTNTTNQTRNASETITTSDRPRIDTTTQSSDQTTRATDPSSPPHHAQSGAKPK

SEQ ID NO: 142 - protein, 231 aa, human metapneumo virus
MEVRVENIRAIDMFKAKIKNRIRSSRCYRNATLILIGLTALSMALNIFLIIDHATLRNMIKTENCANMPPAEPSKKTPMTSTAGPNTKPNPQQATQWTTENSTFPAATSEGHLHTGTTQTPDTTAPQQTTDKHTALPKSTNEQITQTTTEKKTTRATTQRREKGKENTNQTTSTAATQTTNTTNQIRNASETITTSDRPRTDSTTQSSEQTTRATDPSSPPHHAQGSAKPK

SEQ ID NO: 143 - protein, 231 aa, human metapneumo virus
MEVRVENIRAIDMFKAKIKNRIRSSRCYRNATLILIGLTALSMALNIFLIIDHATLRNMIKTENCANMPPAEPSRKTPMTSTAGPNTKPNPQQATQWTTENSTSPAATPEGHLHTGTTQTPDTTAPQQTTDKHTALPKSTNEQITQATTEKKTTRETTQRREKGKENTNQTTSTAATQTTNTTNQIRNASETITTSDRPRTDSTTQSSEQTTQATDPSSPAHHAQGSAKPK

SEQ ID NO: 144 - protein, 231 aa, human metapneumo virus
MEVRVENIRAIDMFKAKIKNRIRSSRCYRNATLILIGLTALSMALNIFLIIDHATLRNMIKTENCANMPPAEPSKKTPMTSTAGLNTKPNPQQATQWTTENSTSPAATPEGHLHTGTTQTPDTTAPQQTTDKHTALPKSTNEQITQTTTEKKTTRATTQRREKGKENTNQTTSTAATQTTNTTNQIRNASETITTSDRPRTDSTTQSSEQTTRATDPSSPPHHAQGSAKPK

SEQ ID NO: 145 - protein, 231 aa, human metapneumo virus
MEVRVENIRAIDMFKAKIKNRIRSSRCYRNATLILIGLTALSMALNIFLIIDHATLRNMIKTENCANMPPAEPSKKTPMTSTAGPNTKPNPQQATQWTTENSTSPAATPEGHLHTGTTQTPDTTAPQQTTDKHTALPKSTNEQITQTTTEKKTTRATTQRREKGKENTNQTTSTAATQTTNTTNQIRNAIETITTSDRPRTDSTTQSSEQTTRATDPSSHPHHAQGSAKPK

SEQ ID NO: 146 - protein, 236 aa, human metapneumo virus
MEVRVENIRAIDMFKAKMKNRIRSSKCYRNATLILIGLTALSMALNIFLIIDYAMLKNMTKVEHCVNMPPVEPSKKTPMTSAVDLNTKPNPQQATQLAAEDSTSLAATSEDHLHTGTTPTPDATVSQQTTDEYTTLLRSTNRQTTQTTTEKKPTGATTKKETTTRTTSTAATQTLNTTNQTSYVREATTTSARSRNSATTQSSDQTTQAADPSSQPHHTQKSTTTTYNTDTSSPSS

SEQ ID NO: 147 - protein, 236 aa, Human metapneumo virus
  VARIANT 220, 227: Xaa = unknown amino acid or other
MEVRVENIRTIDMFKAKMKNRIRSSKCYRNATLILIGLTALSMALNIFLIIDYATFKNMTKVEHCANMPPVEPSKKTPMTSTVDSSTGPNPQQTTQWTTEDSTSLAATSEDHLHTGTTPTLDATVSQQTPDKHTTPLRSTNGQTTQTTTEKKPTRAIAKKETTNQTTSTAATQTFNTTNQTRNGRETTITSARSRNDATTQSSEQTNQTTDPSSQPHHAXISTITIXTQHRHIFSK

SEQ ID NO: 148 - protein, 236 aa, Human metapneumo virus
  VARIANT 208: Xaa = unknown amino acid or other
MEVRVENIRAIDMFKAKMKNRIRSSKCYRNATLILIGLTALSMALNIFLIIDYAMLKNMTKVEHCVNMPPVEPSKKTPMTSAVDLNTKLNPQQATQLTTEDSTSLAATSEDHLLTGTTPTPDATVSQQTTDEHTTLLRSTNRQTTQTTTEKKPTGATTKKETTTRTTSTAATQTLNTTNQTSNGREATTTSTRSRNGATTQNSDQTTXTADPSSQPHHTQKSTTTTYNTDTSSPSS

SEQ ID NO: 149 - protein, 236 aa, human metapneumo virus
MEVRVENIRAIDMFKAKMKNRIRSSKCYRNATLILIGLTALSMALNIFLIIDYATLKNMTKVEHCVNMPPVEPSKKTPMTSAVDLNTKLNPQQATQLTTEDSTSLAATSEGHPHTGTTPTPDATVSQQTTDEHTTLLRSTNRQTTQTATEKKPTGATTKKETTTRTTSTAATQTPNTTNQTSNGREATTTSARSRNGATTQNSDQITQAADSSSQPHHTQKSTTTAYNTDTSFPSS

SEQ ID NO: 150 - protein, 236 aa, human metapneumo virus
MEVRVENIRAIDMFKAKMKNRIRSSKCYRNATLILIGLTALSMALNIFLIIDYATLKNMTKVEHCVNMPPVEPSKKTPMTSAVDSNTKPNPQQATQLTTEDSTSLAATLEDHPHTGTTPTPDATVSQQTTDEHTTLLRSTNRQTTQTTAEKKPTRATTKKETTTRTTSTAATQTLNTTNQTSNGREATTTSARSRNNATTQSSDQTTQAAEPSSQSQHTQKSTTTTYNTDTSSLSS

SEQ ID NO: 151 - protein, 236 aa, human metapneumo virus
MEVRVENIRAIDMFKAKMKNRIRSSKCYRNATLILIGLSALSMALNIFLIIDYAKSKNMTRVEHCVNMPPVEPSKKTPMTSAVDLNTKPNPQRATQLTTEDSTSLAATLEGHLHTGTTPTPDVTVSQQTTDEHTTLLRSTNRQTTQTAAEKKPTRVTTNKETITRTTSTAATQTLNTTNQTNNGREATTTSARSRNNATTQSSDQTTQAADPSSQSQHTQKSITTTYNTDTSSPSS

SEQ ID NO: 152 - protein, 236 aa, human metapneumo virus
MEVRVENIRAIDMFKAKMKNRIRSSKCYRNATLILIGLSALSMALNIFLIIDYAKSKTMTRVEHCVNMPPVEPSKKTPMTSAVDLNTKPNPQQATQLTTEDSTSPAATLEGHLHTGTTPTPDATVSQQTTDEHTTLLRSTNRQTTQTTAEKKPTRATTKKETITRTTSTAATQTLNTTNQTSNGREATTTSARSRNNATTQSSDQTTQAADPSSQSQHTKKSTTTTYNTDTSSPSS

SEQ ID NO: 153 - protein, 236 aa, human metapneumo virus
MEVRVENIRAIDMFKAKMKNRIRSSKCYRNATLILIGLTALSMALNIFLIIDYATLKNMTKVEHCVNMPPVEPSKKTPMTSAVDLNTKPNPQQATQLTTEDSTSLAATLEDHPHTGTTPTPDATVSQQTTDEHTTLLRSTNRQTTQTTAEKKPTRATTKKETTTRTTSTAATQTLNTTNQTSNGREATTTSARSRNNATTQSSDQTTQAAEPNSQSQHTQKSTTTTYNTDTSSLSS

SEQ ID NO: 154 - DNA, 449 bp, human metapneumo virus
ataggagtttacggaagctccgtaatttacatggtgcaactgccaatctttggggttatagacacgccttgctggatagtaaaagcagccccttcttgttcaggaaaaaagggaaactatgcttgcctcttaagagaagaccaaggatggtattgtcaaaatgcagggtcaactgtttactacccaaatgaaaaagactgtgaaacaagaggagaccatgtcttttgcgacacagcagcaggaatcaatgttgctgagcagtcaaaggagtgcaacataaacatatctactactaattacccatgcaaagttagcacaggaagacatcctatcagtatggttgcactatctcctcttggggctttggttgcttgctacaagggagtgagctgttccattggcagcaacagagtagggatcatcaagcaactgaacaaaggctgctctta

SEQ ID NO: 155 - DNA, 449 bp, human metapneumo virus
ataggagtttacggaagctccgtaatttacatggtgcaactgccaatctttggggttatagacacgccttgctggatagtaaaagcagccccttcttgctcagaaaaaaagggaaactatgcttgcctcttaagagaagatcaaggatggtattgtcagaatgcagggtcaactgtttactacccaaatgaaaaagactgcgaaacaagaggagaccatgtcttttgcgacacagcagcaggaatcaatgttgctgagcagtcaaaggagtgcaacatcaacatatccactactaattacccatgcaaagttagcacaggaagacatcctatcagtatggttgcactgtctcctcttggggctttggttgcttgctacaagggagtgagctgttccattggcagcaacagagtagggatcatcaagcaactgaacaaaggctgctctta

SEQ ID NO: 156 - DNA, 449 bp, human metapneumo virus
ataggagtttacggaagctccgtaatttacatggtgcaactgccaatctttggggttatagacacgccttgctggatagtaaaagcagccccttcttgctcagaaaaaaagggaaactatgcttgcctcttaagagaagatcaaggatggtattgtcagaatgcagggtcaactgtttactacccaaatgaaaaagattgcgaaacaagaggagaccatgtcttttgcgacacagcagcaggaatcaatgttgctgagcagtcaaaggagtgcaacatcaacatatccactactaattacccatgcaaagttagcacaggaagacatcctatcagtatggttgcactgtctcctcttggggctttggttgcttgctacaagggagtgagctgttccattggcagcaacagagtagggatcatcaagcaactgaacaaaggctgctctta

SEQ ID NO: 157 - DNA, 449 bp, human metapneumo virus; identical to SEQ ID NO: 155

SEQ ID NO: 158 - DNA, 449 bp, human metapneumo virus
ataggagtttacggaagctccgtaatttacatggtgcaactgccaatctttggggttatagacacgccttgctggatagtaaaagcagccccttcttgctcagaaaaaaagggaaactatgcttgcctcttaagagaagatcaaggatggtattgtcagaatgcagggtcaactgtttactacccaaatgaaaaagattgcgaaacaagaggagaccatgtcttttgcgacacagcagcaggaatcaatgttgctgagcagtcaaaggagtgcaacatcaacatatccactactaattacccatgcaaagttagcacaggaagacatcctatcagtatggttgcactgtctcctcttggggctttggttgcttgctacaagggagtgagctgttccattggtagcaacagagtagggatcatcaagcaactgaacaaaggctgctctta

SEQ ID NO: 159 - DNA, 449 bp, human metapneumo virus
ataggagtttacggaagctccgtaatttacatggtgcaactgccaatctttggggttatagacacgccttgctggatagtaaaagcagccccttcttgttcagaaaaaaagggaaactatgcttgcctcttaagagaagaccaaggatggtattgtcagaatgcagggtcaactgtttactacccaaatgaaaaagactgtgaaacaagaggagaccatgtcttttgcgacacagcagcaggaatcaatgttgctgagcagtcaaaggagtgcaacataaacatatctactactaattacccatgcaaagttagcacaggaagacatcctatcagtatggttgcactgtctcctcttggggctttggttgcttgctacaagggagtgagctgttccattggcagcaacagagtagggatcatcaagcaactgaacaaaggctgctctta

SEQ ID NO: 160 - DNA, 449 bp, human metapneumo virus; identical to SEQ ID NO: 159

SEQ ID NO: 161 - DNA, 449 bp, human metapneumo virus; identical to SEQ ID NO: 159

SEQ ID NO: 162 - DNA, 449 bp, human metapneumo virus
ataggagtttacggaagctccgtaatttacatggtgcaactgccaatctttggggttatagacacgccttgctggatagtaaaagcagccccttcttgctcagaaaaaaagggaaactatgcttgcctcttaagagaagatcagggatggtattgtcagaatgcagggtcaactgtttactacccaaatgaaaaagactgtgaaacaagaggagaccatgtcttttgcgacacagcagcaggaatcaatgttgctgagcagtcaaaggagtgcaacatcaacatatccactactaattacccatgcaaagttagcacaggaagacatcctatcagtatggttgcactgtctcctcttggggctttggttgcttgctacaagggagtgagctgttccattggcagcaacagagtaggaatcatcaagcaactgaacaaaggctgctctta

SEQ ID NO: 163 - DNA, 449 bp, human metapneumo virus
ataggagtttacggaagctccgtaatttacatggtgcaactgccaatctttggagttatagacacgccttgctggatagtaaaagcagccccttcttgctcagaaaaaaagggaaactatgcttgcctcttaagagaagatcaaggatggtattgtcagaatgcagggtcaactgtttactacccaaatgaaaaagactgcgaaacaagaggagaccatgtcttttgcgacacagcagcaggaatcaatgttgctgagcagtcaaaggagtgcaacatcaacatatccactactaattacccatgcaaagttagcacaggaagacatcctatcagtatggttgcactgtctcctcttggggctttggttgcttgctacaagggagtgagctgttccattggcagcaacagagtagggatcatcaagcaactgaacaaaggctgctctta

SEQ ID NO: 164 - DNA, 449 bp, human metapneumo virus
ataggagtttacggaagctccgtaatttacatggtgcaactgccaatctttggggttatagacacgccttgttggatagtaaaagcagccccttcttgctcagaaaaaaaggggaactatgcttgcctcttaagagaagatcaaggatggtattgtcagaatgcagggtcaactgtttactacccaaatgaaaaagactgcgaaacaagaggagaccatgtcttttgcgacacagcagcaggaatcaatgttgctgagcagtcaaaggagtgcaacatcaacatatccactactaattacccatgcaaagttagcacaggaagacatcctatcagtatggttgcactgtctcctcttggggctttggttgcttgctacaagggagtgagctgttccattggcagcaacagagtagggatcatcaagcaactgaacaaaggctgctctta

SEQ ID NO: 165 - DNA, 449 bp, human metapneumo virus
ataggagtttacggaagctccgtaatttacatggtgcaactgccaatctttggagttatagacacgccttgctggatagtaaaagcggccccttcttgctcagaaaaaaagggaaactatgcttgcctcttaagagaagatcaaggatggtattgtcagaatgcagggtcaactgtttactacccaaatgaaaaagactgcgaaacaagaggagaccatgtcttttgcgacacagcagcaggaatcaatgttgctgagcagtcaaaggagtgcaacatcaacatatccactactaattacccatgcaaagttagcacaggaagacatcctatcagtatggttgcactgtctcctcttggggctttggttgcttgctacaagggagtgagctgttccattggcagcaacagagtagggatcatcaagcaactgaacaaaggctgctctta

SEQ ID NO: 166 - DNA, 449 bp, human metapneumo virus
ataggagtttacggaagctccgtaatttacatggtgcaactgccaatctttggggttatagacacgccttgctggatagtaaaagcagccccttcttgctcagaaaaaaagggaaactatgcttgccttttaagagaagatcaaggatggtattgtcagaatgcagggtcaactgtttactacccaaatgaaaaagactgcgaaacaagaggagaccatgtcttttgcgacacagcagcaggaatcaatgttgctgagcagtcaaaggagtgcaacatcaatatatccactactaattacccatgcaaagttagcacaggaagacatcctatcagtatggttgcactgtctcctcttggggctttggttgcttgctacaagggagtgagctgttccattggcagcaacagagtagggatcatcaagcaactgaacaaaggctgctctta

SEQ ID NO: 167 - DNA, 449 bp, human metapneumo virus
ataggagtttacggaagctccgtaatttacatggtgcaactgccaatctttggagttatagacacgccttgctggatagtaaaagcggccccttcttgctcggaaaaaaagggaaactatgcttgcctcttaagagaagatcaaagatggtattgtcagaatgcagggtcaactgtttactacccaaatgaaaaagactgcgaaacaagaggagaccatgtcttttgcgacacagcagcaggaatcaatgttgctgagcagtcaaaggagtgcaacatcaacatatccactactaattacccatgcaaagttagcacaggaagacatcctatcagtatggttgcactgtctcctcttggggctttggttgcttgctacaagggagtgagctgttccattggcagcaacagagtagggatcatcaagcaactgaacaaaggctgctctta

SEQ ID NO: 168 - DNA, 449 bp, human metapneumo virus
ataggagtttatggaagctccgtaatttacatggtgcaactgccaatctttggagttatagacacgccttgctggatagtaaaagcggccccttcttgctcagaaaaaaagggaaactatgcttgcctcttaagagaagatcaaggatggtattgtcagaatgcagggtcaactgtttactacccaaatgaaaaagactgcgaaacaagaggagaccatgtcttttgcgacacagcagcaggaatcaatgttgctgagcagtcaaaggagtgcaacatcaacatatccactactaattacccatgcaaagttagcacaggaagacatcctatcagtatggttgcactgtctcctcttggggctttggttgcttgctacaagggagtgagctgttctattggcagcaacagagtagggatcatcaagcaactgaacaaaggctgctctta

SEQ ID NO: 169 - DNA, 449 bp, human metapneumo virus
ataggagtttatggaagctccgtaatttacatggtgcaactgccaatctttggagttatagacacgccttgctggatagtaaaagcggccccttcttgctcagaaaaaaagggaaactatgcttgcctcttaagagaagatcaaggatggtattgtcagaatgcagggtcaactgtttactacccaaatgaaaaagactgcgaaacaagaggagaccatgtcttttgcgacacagcagcaggaatcaatgttgctgagcagtcaaaggagtgcaacatcaacatatccactactaattacccatgcaaagttagcacaggaagacatcctatcagtatggttgcactgtctcctcttggggctttggttgcttgctacaagggagtgagctgttccattggcagcaacagagtagggatcatcaagcaactgaacaaaggctgctctta

SEQ ID NO: 170 - DNA, 449 bp, human metapneumo virus
ataggagtttacggaagctccgtaatttacatggtgcaactgccaatctttggagttatagacacgccttgctggatagtaaaagcggccccttcttgctcagaaaaaaagggaaactatgcttgcctcttaagagaagatcaaggatggtattgtcagaatgcagggtcaactgtttactacccaaatgaaaaagactgcgaaacaagaggagaccatgtcttttgcgacacagcagcaggaatcaatgttgctgagcagtcaaaggagtgcaacatcaacatatccaccactaattacccatgcaaagttagcacaggaagacatcctatcagtatggttgcactgtctcctcttggggctttggttgcttgctacaagggagtgagctgttccattggcagcaacagagtagggatcatcaagcaactgaacaaaggctgctctta

SEQ ID NO: 171 - DNA, 449 bp, human metapneumo virus; identical to SEQ ID NO: 169

SEQ ID NO: 172 - DNA, 449 bp, human metapneumo virus; identical to SEQ ID NO: 169

SEQ ID NO: 173 - DNA, 449 bp, human metapneumo virus; identical to SEQ ID NO: 169

SEQ ID NO: 174 - DNA, 449 bp, human metapneumo virus; identical to SEQ ID NO: 154

SEQ ID NO: 175 - DNA, 449 bp, human metapneumo virus; identical to SEQ ID NO: 154

SEQ ID NO: 176 - DNA, 449 bp, human metapneumo virus; identical to SEQ ID NO: 170

SEQ ID NO: 177 - DNA, 449 bp, human metapneumo virus
ataggagtttacggaagctccgtaatttacatggtgcaactgccaatctttggggttatagacacgccttgctggatagtaaaagcagccccttcttgctcagaaaaaaagggaaactatgcttgcctcttaagagaagatcaaggatggtattgtcagaatgcagggtcaactgtttactacccaaatgaaaaagactgcgaaacaagaggagaccatgtcttttgcgacacagcagcaggaatcaatgttgctgagcagtcaaaggagtgcaacatcaacatatccactactaattacccatgcaaagttagcacaggaagacatcctatcagtatggttgcactgtctcctcttggggctctggttgcttgctacaagggagtgagctgctccattggcagcaacagagtagggatcatcaagcaactgaacaaaggctgctctta

SEQ ID NO: 178 - DNA, 449 bp, human metapneumo virus; identical to SEQ ID NO: 170

SEQ ID NO: 179 - DNA, 449 bp, human metapneumo virus; identical to SEQ ID NO: 170

SEQ ID NO: 180 - DNA, 449 bp, human metapneumo virus; identical to SEQ ID NO: 154

SEQ ID NO: 181 - DNA, 449 bp, human metapneumo virus; identical to SEQ ID NO: 169

SEQ ID NO: 182 - DNA, 449 bp, human metapneumo virus; identical to SEQ ID NO: 154

SEQ ID NO: 183 - DNA, 449 bp, human metapneumo virus
ataggggtctacgggagctctgtaatttacatggtgcagctgccaatctttggcgttatagacacgccttgctggatagtaaaagcagccccctcttgttccgaaaaaaagggaaactatgcttgcctcttaagagaagaccaagggtggtattgtcagaatgcagggtcaactgtttactacccaaatgagaaagactgtgaaacaagaggagaccatgtcttttgcgacacagcagcaggaattaatgttgctgagcaatcaaaggagtgcaacatcaacatatccactacaaattacccatgcaaagtcagcacaggaagacatcctatcagtatggttgcactgtcccctcttggggctctggttgcttgctacaaaggagtaagctgttccattggcagcaatagagtagggattatcaagcagctgaacaaaggttgctctta

SEQ ID NO: 184 - DNA, 449 bp, human metapneumo virus
ataggggtctacgggagctccgtaatttacatggtgcagctgccaatctttggcgtcatagacacgccttgctggatagtaaaagcagccccctcttgttccgaaaaaaagggaaactatgcttgccttttaagagaagatcaagggtggtattgtcagaatgcagggtcaactgtttactacccaaatgagaaagactgtgaaacaagaggagaccatgtcttttgcgacacagcagcaggaattaatgttgctgagcaatcaaaagagtgcaacatcaacatatccactacaaattacccatgcaaagtcagcacaggaagacatcctatcagtatggttgcactgtcccctcttggggctctagttgcttgctacaaaggagtaagctgttccattggcagcaatagagtagggatcatcaagcagctgaacaaaggttgctccta

SEQ ID NO: 185 - DNA, 449 bp, human metapneumo virus
ataggggtctacgggagctccgtaatttacatggtgcagctgccaatctttggcgtcatagacacgccttgctggatagtaaaagcagccccctcttgttccgaaaaaaagggaaactatgcttgccttttaagagaagatcaagggtggtattgtcagaatgcagggtcaactgtttactacccaaatgagaaagactgtgaaacaagaggagaccatgtcttttgcgacacagtagcaggaattaatgttgctgagcaatcaaaagagtgcaacatcaacatatccactacaaattacccatgcaaagtcagcacaggaagacatcctatcagtatggttgcactgtcccctcttggggctctagttgcttgctacaaaggagtaagctgttccattggcagcaatagagtagggatcatcaagcagctgaacaaaggttgctccta

SEQ ID NO: 186 - DNA, 449 bp, human metapneumo virus; identical to SEQ ID NO: 184

SEQ ID NO: 187 - DNA, 449 bp, human metapneumo virus
ataggggtctacgggagctccgtaatttacatggtgcagctgccaatctttggcgttatagacacgccctgctggatagtaaaagcagccccctcttgttccgaaaaaaagggaaactatgcttgccttctaagagaagaccaagggtggtattgtcagaatgcagggtcaactgtttactacccaaatgagaaggactgtgaaacaagaggagaccatgtcttttgcgacacagcagcaggaattaatgttgctgagcaatcaaaggagtgcaacatcaacatatccaccacaaattacccatgcaaagtcagcacaggaaggcatcctatcagtatggttgcactgtcccctcttggggctctggttgcttgttacaaaggagtaagctgttctattggcagcaatagagtagggatcatcaagcagctgaacaaaggttgctctta

SEQ ID NO: 188 - DNA, 449 bp, human metapneumo virus
ataggggtctacgggagctccgtaatttacatggtgcagctgccaatctttggcgttatagacacgccttgctggatagtaaaagcagccccctcttgttccgaaaaaaagggaaactatgcttgcctcttaagagaagaccaagggtggtattgtcagaatgcagggtcaactgtttactacccaaatgagaaagactgtgaaacaagaggagaccatgtcttttgcgacacagcagcaggaattaatgttgctgagcaatcaaaggagtgcaacatcaacatatccactacaaattacccatgcaaagtcagcacaggaagacatcctatcagtatggttgcactgtctcctcttggggctctagttgcttgctacaaaggagtaagctgttccattggcagcaacagagtagggatcatcaagcagctgaacaaaggttgctccta

SEQ ID NO: 189 - DNA, 449 bp, human metapneumo virus; identical to SEQ ID NO: 187

SEQ ID NO: 190 - DNA, 449 bp, human metapneumo virus
ataggggtctacgggagctccgtaatttacatggtgcagctgccaatctttggcgttatagacacgccttgctggatagtaaaagcagccccttcttgttccgaaaaaaagggaaactatgcttgcctcttaagagaagaccaagggtggtattgtcagaatgcagggtcaactgtttactacccaaatgagaaagactgtgaaacaagaggagaccatgtcttttgcgacacagcagcaggaattaatgttgctgagcaatcaaaggagtgcaacatcaacatatccactacaaattacccatgcaaagtcagcacaggaagacatcctatcagtatggttgcactgtctcctcttggggctctggttgcttgctacaaaggagtaagctgttccattggcagcaacagagtagggatcatcaagcagctgaacaaaggttgctccta

SEQ ID NO: 191 - DNA, 449 bp, human metapneumo virus; identical to SEQ ID NO: 190

SEQ ID NO: 192 - DNA, 449 bp, human metapneumo virus
ataggggtctacgggagctccgtaatttacatggtgcagctgccaatctttggcgttatagacacgccttgctggatagtaaaagcagccccttcttgttccgaaaaaaagggaaactatgcttgcctcttaagagaagaccaaggatggtattgtcagaatgcagggtcaactgtttactacccaaatgagaaagactgtgaaacaagaggagaccatgtcttttgcgacacagcagcaggaattaatgttgctgagcaatcaaaggagtgcaacatcaacatatccaccacaaattacccatgcaaagtcagcacaggaaggcatcctatcagtatggttgcactgtcccctctcggggctctggttgcctgttacaaaggagtaagttgttccattggcagcaatagagtagggatcatcaagcagctgaacaaaggttgctctta

SEQ ID NO: 193 - DNA, 449 bp, human metapneumo virus
ataggggtctacgggagctccgtaatttacatggtgcagctgccaatctttggcgttatagacacgccttgctggatagtaaaagcagccccttcttgttccgaaaaaaagggaaactatgcttgcctcttaagagaagaccaagggtggtattgtcagaatgcagggtcaactgtttactacccaaatgagaaagactgtgaaacaagaggagaccatgtcttttgcgacacagcagcaggaattaatgttgctgagcaatcaaaggagtgcaacatcaacatatccactacaaattacccatgcaaagtcagcacaggaagacatcctatcagtatggttgcactgtctcctcttggggctctggttgcttgctacaaaggagtaagctgttccattggcagcaacagagtagggatcataaagcagctgaacaaaggttgctccta

SEQ ID NO: 194 - DNA, 449 bp, human metapneumo virus; identical to SEQ ID NO: 192

SEQ ID NO: 195 - DNA, 449 bp, human metapneumo virus
ataggggtctacgggagctccgtaatttacatggtgcagctgccaatctttggcgttatagacacaccttgctggatagtaaaagcagccccttcttgttccgaaaaaaagggaaattatgcttgcctcttaagagaagaccaagggtggtattgtcagaatgcagggtcaactgtttactacccaaatgagaaagactgtgaaacaagaggagaccatgtcttttgcgacacagcagcaggaattaatgttgctgagcaatcaaaggaatgcaacatcaacatatccactacaaattacccatgcaaagtcagcacaggaagacatcctatcagtatggttgcactgtctcctcttggggctctggttgcttgctacaaaggagtaagctgttccattggcagcaacagagtagggatcatcaagcagctgaacaaaggttgctccta

SEQ ID NO: 196 - DNA, 449 bp, human metapneumo virus; identical to SEQ ID NO: 192

SEQ ID NO: 197 - DNA, 449 bp, human metapneumo virus; identical to SEQ ID NO: 193

SEQ ID NO: 198 - DNA, 449 bp, human metapneumo virus
ataggggtctacggaagctccgtgatttacatggttcaattgccgatctttggtgtcatagatacaccttgttggataatcaaggcagctccctcttgctcagaaaaaaacgggaattatgcttgcctcctaagagaggatcaagggtggtattgtaaaaatgcaggatccactgtttactacccaaatgaaaaagactgcgaaacaagaggtgatcatgttttttgtgacacagcagcagggatcaatgttgctgagcaatcaagagaatgcaacatcaacatatctactaccaactacccatgcaaagtcagcacaggaagacaccctataagcatggttgcactatcacctctcggtgctttggtggcttgctataaaggggtaagctgctcgattggcagcaatcgggttggaatcatcaaacaattacctaaaggctgctcata

SEQ ID NO: 199 - DNA, 449 bp, human metapneumo virus
ataggggtctacggaagctctgtgatttacatggttcaattgccgatctttggtgtcatagatacaccttgttggatcatcaaggcagctccctcttgctcagaaaaaaacgggaattatgcttgcctcctaagagaggatcaagggtggtattgtaaaaatgcaggatctactgtttactacccaaatgaaaaagactgcgaaacaagaggtgatcatgttttttgtgacacagcagcagggatcaatgttgctgagcaatcaagagaatgcaacatcaacatatctactaccaactacccatgcaaagtcagcacaggaagacaccctataagcatggttgcactatcacctctcggtgctttggtggcttgctataaaggggtaagctgctcgattggcagcaattgggttggaatcatcaaacaattacccaaaggctgctcata

SEQ ID NO: 200 - DNA, 449 bp, human metapneumo virus
ataggggtctacggaagctctgtgatttacatggttcaattgccgatctttggtgtcatagatacaccttgttggatcatcaaggcagctccctcttgctcagaaaaaaacgggaattatgcttgcctcctaagagaggatcaagggtggtattgtaaaaatgcaggatctactgtttactacccaaatgaaaaagactgcgaaacaagaggtgatcatgttttttgtgacacagcagcagggatcaatgttgctgagcaatcaagagaatgcaacatcaacatatctactaccaactacccatgcaaagtcagcacaggaagacaccctataagcatggttgcactatcacctctcggtgctttggtggcttgctataaaggggtaagctgctcgattggcagcaatcgggttggaatcatcaaacaattacccaaaggctgctcata

SEQ ID NO: 201 - DNA, 449 bp, human metapneumo virus; identical to SEQ ID NO: 200

SEQ ID NO: 202 - DNA, 449 bp, human metapneumo virus
ataggggtctacggaagctctgtgatttacatggttcaattgccgatctttggtgtcatagatacaccttgttggataatcaaggcagctccctcttgctcagaaaaaaacgggaattatgcttgcctcctaagagaggatcaagggtggtattgcaaaaatgcaggatccactgtttactacccaaatgaaaaagactgcgaaacaagaggtgatcatgttttttgtgacacagcagcagggatcaatgttgctgagcaatcaagagaatgcaacatcaacatatctactaccaactacccatgcaaagtcagcacaggaagacaccctataagcatggttgcactatcacctctcggtgctttggtggcttgctataaaggggtaagctgctcgattggcagcaatcgggttggaatcatcaaacaattacctaaaggctgctcata

SEQ ID NO: 203 - DNA, 449 bp, human metapneumo virus; identical to SEQ ID NO: 198

SEQ ID NO: 204 - DNA, 449 bp, human metapneumo virus
ataggggtctacggaagctctgtaatttacatggttcaattgccgatctttggtgtcatagatacaccttgttggataatcaaggcagctccctcttgctcagaaaaaaacgggaattatgcttgcctcctaagagaggatcaagggtggtattgtaaaaatgcaggatccactgtttactacccaaatgaaaaagactgcgaaacaagaggtgatcatgttttttgtgacacagcagcagggatcaatgttgctgagcaatcaagagaatgcaacatcaacatatctactaccaactacccatgcaaagtcagcacaggaagacaccctataagcatggttgcactatcacctctcggtgctttggtggcttgctataaaggggtaagctgctcgattggcagcaatcgggttggaatcatcaaacaattacctaaaggctgctcata

SEQ ID NO: 205 - DNA, 449 bp, human metapneumo virus
ataggggtctacggaagctccgtgatttacatggttcaattgccgatctttggtgtcatagatacaccttgttggataatcaaggcagctccctcttgctcagaaaaaaacgggaattatgcttgcctcctaagagaggatcaagggtggtattgtaaaaatgcaggatccactgtttactacccaaatgaaaaagactgcgaaacaagaggtgatcatgttttttgtgacacagcagcagggatcaatgttgctgagcaatcaagagaatgcaacatcaacatatctactaccaactacccatgcaaagtcagcacaggaagacactctataagcatggttgcactatcacctctcggtgctttggtggcttgctataaaggggtaagctgctcgattggcagcaatcgggttggaatcatcaaacaattacctaaaggctgctcata

SEQ ID NO: 206 - DNA, 449 bp, human metapneumo virus; identical to SEQ ID NO: 198

SEQ ID NO: 207 - DNA, 449 bp, human metapneumo virus
ataggggtctacggaagctctgtgatttacatggttcaattgccgatctttggtgtcatagatacaccttgttggataatcaaggcagctccctcttgctcagaaaaaaacgggaattatgcttgcctcctaagagaggatcaagggtggtattgtaaaaatgcaggatccactgtttactacccaaatgaaaaagactgtgaaacaagaggtgatcatgttttttgtgacacagcagcagggatcaatgttgctgagcaatcaagagaatgcaacatcaacatatctactaccaactacccatgcaaagtcagcacaggaagacaccctataagcatggttgcactatcacctctcggtgctttggtggcttgctataaaggggtaagctgctcgattggcagcaatcgggttggaatcatcaaacaattacctaaaggctgctcata

SEQ ID NO: 208 - DNA, 449 bp, human metapneumo virus
ataggggtctacggaagctccgtgatttacatggttcaattgccgatctttggtgtcatagatacaccttgttggataatcaaggcagctccctcttgctcagaaaaaaacgggaattatgcttgcctcctaagagaggatcaagggtggtactgtaaaaatgcaggatccactgtttactacccaaatgaaaaagactgcgaaacaagaggtgatcatgttttttgtgacacagcagcagggatcaatgttgctgagcaatcaagagaatgcaacatcaacatatctactaccaactacccatgcaaagtcagcacaggaagacaccctataagcatggttgcactatcacctctcggtgctttggtggcttgctataaaggggtaagctgctcgattggcagcaatcgggttggaatcatcaaacaattacctaaaggctgctcata

SEQ ID NO: 209 - DNA, 449 bp, human metapneumo virus
ataggggtctacggaagctctgtgatttacatggttcaattgccgatctttggggtcatagatacaccttgttggataatcaaggcagctccctcttgctcagaaaaaaacgggaattatgcttgcctcctaagagaggatcaagggtggtattgtaaaaatgcaggatccactgtttactacccaaatgaaaaagactgcgaaacaagaggtgatcatgttttttgtgatacagcagcagggatcaatgttgctgagcaatcaagagaatgcaacatcaacatatctactaccaactacccatgcaaagtcagcacaggaagacaccctataagcatggttgcactatcacctctcggtgctttggtggcttgctataaaggggtaagctgctcgattggcagcaatcgggttggaatcatcaaacaattacccaaaggctgctcata

SEQ ID NO: 210 - DNA, 449 bp, human metapneumo virus
ataggggtctacggaagctctgtgatttacatggttcaattgccgatctttggtgtcatagatacaccttgttggataatcaaggcagccccctcttgctcagagaaaaacgggaattatgcttgcctcctaagagaggatcaagggtggtattgtaaaaatgcaggatccactgtttactacccaaatgaaaaagactgcgaaacaagaggtgatcatgtgttttgtgacacagcagcagggatcaatgttgctgagcaatcaagagaatgcaacatcaacatatctactaccaactacccatgcaaagtcagcacaggaagacaccctataagcatggttgcactatcacctctcggtgctttggtggcttgctataaaggggtaagctgctcgattggcagcaatcgggttggaattatcaaacaattacctaaaggctgctcata

SEQ ID NO: 211 - DNA, 449 bp, human metapneumo virus
ataggggtctacggaagctctgtgatttacatggttcaattgccgatctttggtgtcatagatacaccttgttggataatcaaggcagctccctcttgctcagagaaaaacgggaattatgcttgcctcctaagagaggatcaagggtggtattgtaaaaatgcaggatccactgtttactacccaaatgaaaaagactgcgaaacaagaggtgatcatgtgttttgtgacacagcagcagggatcaatgttgctgagcaatcaagagaatgcaacatcaacatatctactaccaactacccatgcaaagtcagcacaggaagacaccctataagcatggttgcactatcacctctcggtgctttggtggcttgctataaaggggtaagctgctcgattggcagcaatcgggttggaatcatcaaacaattacctaaaggctgctcata

SEQ ID NO: 212 - DNA, 449 bp, human metapneumo virus; identical to SEQ ID NO: 207

SEQ ID NO: 213 - DNA, 449 bp, human metapneumo virus; identical to SEQ ID NO: 198

SEQ ID NO: 214 - DNA, 449 bp, human metapneumo virus; identical to SEQ ID NO: 211

SEQ ID NO: 215 - DNA, 449 bp, human metapneumo virus
ataggggtctacggaagctctgtgatttacatggttcaattgccgatctttggtgtcatagatacaccttgttggataatcaaggcagctccctcttgctcagaaaaaaacgggaattatgcttgcctcctaagagaggatcaagggtggtattgtaaaaatgcaggatccactgtttactacccaaatgaaaaagactgcgaaacaagaggtgatcatgttttttgtgatacagcagcagggatcaatgttgctgagcaatcaagagaatgcaacatcaacatatctactaccaactacccatgcaaagtcagcacaggaagacaccctataagcatggttgcactatcacctctcggtgctttggtggcttgctataaaggggtaagctgctcgattggcagcaatcgggttggaatcatcaaacaattacccaaaggctgctcata

SEQ ID NO: 216 - DNA, 449 bp, human metapneumo virus; identical to SEQ ID NO: 208

SEQ ID NO: 217 - DNA, 449 bp, human metapneumo virus
ataggggtctacggaagctctgtgatttacatggtccagctgccgatctttggtgtcatagatacaccttgttggataatcaaggcagctccctcttgttcagaaaaagatggaaattatgcttgcctcctaagagaggatcaagggtggtattgcaaaaatgcaggatccactgtttactacccaaatgaaaaagactgcgaaacaagaggtgatcatgttttttgtgacacagcagcagggatcaatgttgctgagcaatcaagagaatgcaacatcaacatatctaccaccaactacccatgcaaagtcagcacaggaagacaccctatcagcatggttgcactatcacctctcggtgctttggtagcttgctacaagggggttagctgctcgattggcagtaatcgggttggaataatcaaacaactacctaaaggctgctcata

SEQ ID NO: 218 - DNA, 449 bp, human metapneumo virus
ataggggtctacggaagctctgtgatttacatggtccagctgccgatctttggtgtcatagatacaccttgttggataatcaaggcagctccctcttgttcagaaaaagatggaaattatgcttgcctcctaagagaggatcaagggtggtattgtaaaaatgcaggatccactgtttactacccaaatgaaaaagactgcgaaacaagaggtgatcatgttttttgtgacacagcagcagggatcaatgttgctgagcaatcaagagaatgcaacatcaacatatctaccaccaactacccatgcaaagtcagcacaggaagacaccccatcagcatggttgcactatcacctctcggtgctttggtagcttgctacaaaggggttagctgctcgattggcagtaatcgggttggaataatcaaacaactacctaaaggctgctcata

SEQ ID NO: 219 - DNA, 449 bp, human metapneumo virus
ataggggtctacggaagctctgtgatttacatggtccagctgccgatctttggtgtcatagatacaccttgttggataatcaaggcagctccctcttgttcagaaaaagatggaaattatgcttgcctcctaagagaggatcaagggtggtattgtaaaaatgcaggatccactgtttactacccaaatgaaaaagactgcgaaacaagaggtgatcatgttttttgtgacacagcagcagggatcaatgttgctgagcaatcaagagaatgcaacatcaacatatctaccaccaactacccatgcaaagtcagcacaggaagacaccctatcagcatggttgcactatcacctctcggtgctttggtagcttgctacaaaggggttagctgctcgattggcagtaatcgggttggaataatcaaacaactacctaaaggctgctcata

SEQ ID NO: 220 - DNA, 449 bp, human metapneumo virus
ataggggtctacggaagctccgtgatttacatggtccagctgccgatctttggtgtcatagatacaccttgttggataatcaaggcagctccctcttgttcagaaaaagatggaaattatgcttgcctcctaagagaggaccaagggtggtattgtaaaaatgcgggatccactgtttactacccaaatgaaaaagactgcgaaacaagaggtgatcatgttttttgtgacacagcagcagggatcaatgttgctgagcaatcaagagaatgcaacatcaacatatctacaaccaactacccatgcaaagtcagcacaggaagacaccctatcagcatggttgcactatcacctctcggtgctttggtagcttgctacaaaggggttagctgttcgattggcagtaatcgggttggaataatcaaacaactacctaaaggctgctcata

SEQ ID NO: 221 - DNA, 449 bp, human metapneumo virus
ataggggtctacggaagctccgtgatttacatggtccagctaccgatctttggtgtcatagatacaccttgttggataatcaaggcagctccctcttgttcagaaaaagatggaaattatgcttgcctcctaagagaggatcaagggtggtattgtaaaaatgcaggatccactgtttactacccaaatgaaaaagactgcgaaacaagaggtgatcatgttttttgtgacacagctgcagggatcaatgttgctgagcaatcaagagaatgcaacatcaacatatccacaaccaactacccatgcaaagtcagcacaggaagacaccctatcagcatggttgcactgtcacctctcggcgctttggtagcttgctacaaaggggttagctgttcgattggcagtaatcgggttggaataatcaaacaactacctaaaggctgctcata

SEQ ID NO: 222 - DNA, 449 bp, human metapneumo virus
ataggggtctacggaagctccgtgatttacatggtccagctgccgatctttggtgtcatagatacaccttgttggataatcaaggcagctccctcttgttcagaaaaagatggaaattatgcttgcctcctaagagaggatcaagggtggtattgtaaaaatgcaggatccactgtttactacccaaatgaaaaagactgcgaaacaagaggtgatcatgttttttgtgacacagcagcagggatcaatgttgctgagcaatcaagagaatgcaacatcaacatatctactaccaactacccatgcaaagtcagcacaggaagacaccctatcagcatggttgcactatcacctctcggtgctttggtagcttgctacaaaggggttagctgttcgattggcagtaatcgggttggaataatcaaacaactacctaaaggctgctcata

SEQ ID NO: 223 - DNA, 449 bp, human metapneumo virus
ataggggtctacggaagctccgtgatttacatggtccagctgccgatctttggtgtcatagatacaccttgttggataatcaaggcagctccctcttgttcagaaaaagatggaaattatgcttgcctcctaagagaggatcaagggtggtattgtaaaaatgcaggatccactgtttactacccaaatgaaaaagactgtgaaacaagaggtgatcatgttttttgtgacacagcagcagggatcaatgttgctgagcaatcaagagaatgcaacatcaacatatctacaaccaactacccatgcaaagtcagcacaggaagacaccctatcagcatggttgcactatcacctctcggtgctttggtagcttgctacaaaggggttagctgttcgattggcagtaatcgggttggaataatcaaacaactacctaaaggctgctcata

SEQ ID NO: 224 - DNA, 449 bp, human metapneumo virus; identical to SEQ ID NO: 220

SEQ ID NO: 225 - DNA, 449 bp, human metapneumo virus
ataggggtctacggaagctccgtgatttacatggtccagctgccgatctttggtgtcatagatacaccttgttggataatcaaggcagctccctcttgttcagaaaaagatggaaattatgcttgcctcctaagagaggatcaagggtggtattgtaaaaatgcaggatccactgtttactacccaaatgaaaaagactgcgaaacaagaggtgatcatgttttttgtgacacagcagcagggatcaatgttgctgagcaatcaagagaatgcaacatcaacatatctacaaccaactacccatgcaaagtcagcacaggaagacaccctatcagcatggttgcactatcacctctcggtgctttggtagcttgctacaaaggggttagctgttcgattggcagtaatcgggttggaataatcaaacaactacctaaaggctgctcata

SEQ ID NO: 226 - DNA, 449 bp, human metapneumo virus; identical to SEQ ID NO: 223

SEQ ID NO: 227 - DNA, 449 bp, human metapneumo virus
ataggggtctacggaagctccgtgatttacatggtccagctgccgatctttggtgtcatagatacaccttgttggataatcaaggcagctccctcttgttcagaaaaagatggaaattatgcttgcctcctaagagaggatcaagggtggtattgtaaaaatgcaggatccactgtttactacccaaatgaaaaagactgcgaaacaagaggtgatcatgttttttgtgacacagctgcagggatcaatgttgctgagcaatcaagagaatgcaacatcaacatatctacaaccaactacccatgcaaagtcagcacaggaagacaccctatcagcatggttgcactatcacctctcggtgctttggtagcttgctacaaaggggttagctgttcaattggcagtaatcgggttggaataatcaaacaactacctaaaggctgctcata

SEQ ID NO: 228 - DNA, 449 bp, human metapneumo virus; identical to SEQ ID NO: 227

SEQ ID NO: 229 - DNA, 449 bp, human metapneumo virus
ataggggtctacggaagctccgtgatttacatggtccagctgccgatctttggtgtcatagatacaccttgttggataatcaaggcagctccctcttgttcagaaaaagatggaaattatgcttgcctcctaagagaggatcaagggtggtattgtaaaaatgcaggatccactgtttactacccaaatgaaaaagactgcgaaacaagaggtgatcatgttttttgtgacacagctgcagggatcaatgttgctgagcaatcaagagaatgcaacatcaacatatctacaaccaactacccatgcaaagtcagcacaggaagacaccctatcagcatggttgcactatcacctctcggtgctttggtagcttgctacaagggggttagctgttcgattggcagtaatcgggttggaataatcaaacaactacctaaaggctgctcata

SEQ ID NO: 230 - DNA, 449 bp, human metapneumo virus
ataggggtctacggaagctctgtgatttacatggtccagctgccgatctttggtgtcatagatacaccttgttggataatcaaggcagctccctcttgttcagaaaaagatggaaattatgcttgcctcctaagagaggatcaagggtggtattgtaaaaatgcaggatccactgtttactacccaaatgaaaaagactgcgaaacaagaggtgatcatgttttttgtgacacagctgcagggatcaatgttgctgagcaatcaagagaatgcaacatcaacatatccacaaccaactacccatgcaaagtcagcacaggaagacaccctatcagcatggttgcactgtcacctctcggcgctttggtagcttgctacaaaggggttagctgttcgattggcagtaatcgggttggaataatcaaacaactacctaaaggctgctcata

SEQ ID NO: 231 - DNA, 449 bp, human metapneumo virus
ataggggtctacggaagctctgtgatttacatggtccagctgccgatctttggtgtcatagatacaccttgttggataatcaaggcagctccctcttgttcagaaaaagatggaaattatgcttgcctcctaagagaggatcaagggtggtattgtaaaaatgcaggatccactgtttactacccaaatgaaaaagactgcgaaacaagaggtgatcatgttttttgtgacacagcagcagggatcaacgttgctgagcaatcaagagaatgcaacatcaacatatctaccaccaactatccgtgcaaagtcagcacaggaagacaccctatcagcatggttgcactatcacctctcggtgctttggtagcttgctacaaaggggttagctgctcgattggcagtaatcgggttggaataatcaaacaactacctaaaggctgctcata

SEQ ID NO: 232 - DNA, 449 bp, human metapneumo virus; identical to SEQ ID NO: 227

SEQ ID NO: 233 - DNA, 449 bp, human metapneumo virus; identical to SEQ ID NO: 225

SEQ ID NO: 234 - protein, 149 aa, human metapneumo virus
IGVYGSSVIYMVQLPIFGVIDTPCWIVKAAPSCSGKKGNYACLLREDQGWYCQNAGSTVYYPNEKDCETRGDHVFCDTAAGINVAEQSKECNINISTTNYPCKVSTGRHPISMVALSPLGALVACYKGVSCSIGSNRVGIIKQLNKGCS

SEQ ID NO: 235 - protein, 149 aa, human metapneumo virus
IGVYGSSVIYMVQLPIFGVIDTPCWIVKAAPSCSEKKGNYACLLREDQGWYCQNAGSTVYYPNEKDCETRGDHVFCDTAAGINVAEQSKECNINISTTNYPCKVSTGRHPISMVALSPLGALVACYKGVSCSIGSNRVGIIKQLNKGCS

SEQ ID NO: 236 - protein, 149 aa, human metapneumo virus; identical to SEQ ID NO: 235

SEQ ID NO: 237 - protein, 149 aa, human metapneumo virus; identical to SEQ ID NO: 235

SEQ ID NO: 238 - protein, 149 aa, human metapneumo virus; identical to SEQ ID NO: 235

SEQ ID NO: 239 - protein, 149 aa, human metapneumo virus; identical to SEQ ID NO: 235

SEQ ID NO: 240 - protein, 149 aa, human metapneumo virus; identical to SEQ ID NO: 235

SEQ ID NO: 241 - protein, 149 aa, human metapneumo virus; identical to SEQ ID NO: 235

SEQ ID NO: 242 - protein, 149 aa, human metapneumo virus; identical to SEQ ID NO: 235

SEQ ID NO: 243 - protein, 149 aa, human metapneumo virus; identical to SEQ ID NO: 235

SEQ ID NO: 244 - protein, 149 aa, human metapneumo virus; identical to SEQ ID NO: 235

SEQ ID NO: 245 - protein, 149 aa, human metapneumo virus; identical to SEQ ID NO: 235

SEQ ID NO: 246 - protein, 149 aa, human metapneumo virus; identical to SEQ ID NO: 235

SEQ ID NO: 247 - protein, 149 aa, human metapneumo virus
IGVYGSSVIYMVQLPIFGVIDTPCWIVKAAPSCSEKKGNYACLLREDQRWYCQNAGSTVYYPNEKDCETRGDHVFCDTAAGINVAEQSKECNINISTTNYPCKVSTGRHPISMVALSPLGALVACYKGVSCSIGSNRVGIIKQLNKGCS

SEQ ID NO: 248 - protein, 149 aa, human metapneumo virus; identical to SEQ ID NO: 235

SEQ ID NO: 249 - protein, 149 aa, human metapneumo virus; identical to SEQ ID NO: 235

SEQ ID NO: 250 - protein, 149 aa, human metapneumo virus; identical to SEQ ID NO: 235

SEQ ID NO: 251 - protein, 149 aa, human metapneumo virus; identical to SEQ ID NO: 235

SEQ ID NO: 252 - protein, 149 aa, human metapneumo virus; identical to SEQ ID NO: 235

SEQ ID NO: 253 - protein, 149 aa, human metapneumo virus; identical to SEQ ID NO: 235

SEQ ID NO: 254 - protein, 149 aa, human metapneumo virus; identical to SEQ ID NO: 234

SEQ ID NO: 255 - protein, 149 aa, human metapneumo virus; identical to SEQ ID NO: 234

SEQ ID NO: 256 - protein, 149 aa, human metapneumo virus; identical to SEQ ID NO: 235

SEQ ID NO: 257 - protein, 149 aa, human metapneumo virus; identical to SEQ ID NO: 235

SEQ ID NO: 258 - protein, 149 aa, human metapneumo virus; identical to SEQ ID NO: 235

SEQ ID NO: 259 - protein, 149 aa, human metapneumo virus; identical to SEQ ID NO: 235

SEQ ID NO: 260 - protein, 149 aa, human metapneumo virus; identical to SEQ ID NO: 234

SEQ ID NO: 261 - protein, 149 aa, human metapneumo virus; identical to SEQ ID NO: 235

SEQ ID NO: 262 - protein, 149 aa, human metapneumo virus; identical to SEQ ID NO: 234

SEQ ID NO: 263 - protein, 149 aa, human metapneumo virus; identical to SEQ ID NO: 235

SEQ ID NO: 264 - protein, 149 aa, human metapneumo virus; identical to SEQ ID NO: 235

SEQ ID NO: 265 - protein, 149 aa, human metapneumo virus
IGVYGSSVIYMVQLPIFGVIDTPCWIVKAAPSCSEKKGNYACLLREDQGWYCQNAGSTVYYPNEKDCETRGDHVFCDTVAGINVAEQSKECNINISTTNYPCKVSTGRHPISMVALSPLGALVACYKGVSCSIGSNRVGIIKQLNKGCS

SEQ ID NO: 266 - protein, 149 aa, human metapneumo virus; identical to SEQ ID NO: 235

SEQ ID NO: 267 - protein, 149 aa, human metapneumo virus; identical to SEQ ID NO: 235

SEQ ID NO: 268 - protein, 149 aa, human metapneumo virus; identical to SEQ ID NO: 235

SEQ ID NO: 269 - protein, 149 aa, human metapneumo virus; identical to SEQ ID NO: 235

SEQ ID NO: 270 - protein, 149 aa, human metapneumo virus; identical to SEQ ID NO: 235

SEQ ID NO: 271 - protein, 149 aa, human metapneumo virus; identical to SEQ ID NO: 235

SEQ ID NO: 272 - protein, 149 aa, human metapneumo virus; identical to SEQ ID NO: 235

SEQ ID NO: 273 - protein, 149 aa, human metapneumo virus; identical to SEQ ID NO: 235

SEQ ID NO: 274 - protein, 149 aa, human metapneumo virus; identical to SEQ ID NO: 235

SEQ ID NO: 275 - protein, 149 aa, human metapneumo virus; identical to SEQ ID NO: 235

SEQ ID NO: 276 - protein, 149 aa, human metapneumo virus; identical to SEQ ID NO: 235

SEQ ID NO: 277 - protein, 149 aa, human metapneumo virus; identical to SEQ ID NO: 235

SEQ ID NO: 278 - protein, 149 aa, human metapneumo virus
IGVYGSSVIYMVQLPIFGVIDTPCWIIKAAPSCSEKNGNYACLLREDQGWYCKNAGSTVYYPNEKDCETRGDHVFCDTAAGINVAEQSRECNINISTTNYPCKVSTGRHPISMVALSPLGALVACYKGVSCSIGSNRVGIIKQLPKGCS

SEQ ID NO: 279 - protein, 149 aa, human metapneumo virus
IGVYGSSVIYMVQLPIFGVIDTPCWIIKAAPSCSEKNGNYACLLREDQGWYCKNAGSTVYYPNEKDCETRGDHVFCDTAAGINVAEQSRECNINISTTNYPCKVSTGRHPISMVALSPLGALVACYKGVSCSIGSNWVGIIKQLPKGCS

SEQ ID NO: 280 - protein, 149 aa, human metapneumo virus; identical to SEQ ID NO: 278

SEQ ID NO: 281 - protein, 149 aa, human metapneumo virus; identical to SEQ ID NO: 278

SEQ ID NO: 282 - protein, 149 aa, human metapneumo virus; identical to SEQ ID NO: 278

SEQ ID NO: 283 - protein, 149 aa, human metapneumo virus; identical to SEQ ID NO: 278

SEQ ID NO: 284 - protein, 149 aa, human metapneumo virus; identical to SEQ ID NO: 278

SEQ ID NO: 285 - protein, 149 aa, human metapneumo virus
IGVYGSSVIYMVQLPIFGVIDTPCWIIKAAPSCSEKNGNYACLLREDQGWYCKNAGSTVYYPNEKDCETRGDHVFCDTAAGINVAEQSRECNINISTTNYPCKVSTGRHSISMVALSPLGALVACYKGVSCSIGSNRVGIIKQLPKGCS

SEQ ID NO: 286 - protein, 149 aa, human metapneumo virus; identical to SEQ ID NO: 278

SEQ ID NO: 287 - protein, 149 aa, human metapneumo virus; identical to SEQ ID NO: 278

SEQ ID NO: 288 - protein, 149 aa, human metapneumo virus; identical to SEQ ID NO: 278

SEQ ID NO: 289 - protein, 149 aa, human metapneumo virus; identical to SEQ ID NO: 278

SEQ ID NO: 290 - protein, 149 aa, human metapneumo virus; identical to SEQ ID NO: 278

SEQ ID NO: 291 - protein, 149 aa, human metapneumo virus; identical to SEQ ID NO: 278

SEQ ID NO: 292 - protein, 149 aa, human metapneumo virus; identical to SEQ ID NO: 278

SEQ ID NO: 293 - protein, 149 aa, human metapneumo virus; identical to SEQ ID NO: 278

SEQ ID NO: 294 - protein, 149 aa, human metapneumo virus; identical to SEQ ID NO: 278

SEQ ID NO: 295 - protein, 149 aa, human metapneumo virus; identical to SEQ ID NO: 278

SEQ ID NO: 296 - protein, 149 aa, human metapneumo virus; identical to SEQ ID NO: 278

SEQ ID NO: 297 - protein, 149 aa, human metapneumo virus
IGVYGSSVIYMVQLPIFGVIDTPCWIIKAAPSCSEKDGNYACLLREDQGWYCKNAGSTVYYPNEKDCETRGDHVFCDTAAGINVAEQSRECNINISTTNYPCKVSTGRHPISMVALSPLGALVACYKGVSCSIGSNRVGIIKQLPKGCS

SEQ ID NO: 298 - protein, 149 aa, human metapneumo virus; identical to SEQ ID NO: 297

SEQ ID NO: 299 - protein, 149 aa, human metapneumo virus; identical to SEQ ID NO: 297

SEQ ID NO: 300 - protein, 149 aa, human metapneumo virus; identical to SEQ ID NO: 297

SEQ ID NO: 301 - protein, 149 aa, human metapneumo virus; identical to SEQ ID NO: 297

SEQ ID NO: 302 - protein, 149 aa, human metapneumo virus; identical to SEQ ID NO: 297

SEQ ID NO: 303 - protein, 149 aa, human metapneumo virus; identical to SEQ ID NO: 297

SEQ ID NO: 304 - protein, 149 aa, human metapneumo virus; identical to SEQ ID NO: 297

SEQ ID NO: 305 - protein, 149 aa, human metapneumo virus; identical to SEQ ID NO: 297

SEQ ID NO: 306 - protein, 149 aa, human metapneumo virus; identical to SEQ ID NO: 297

SEQ ID NO: 307 - protein, 149 aa, human metapneumo virus; identical to SEQ ID NO: 297

SEQ ID NO: 308 - protein, 149 aa, human metapneumo virus; identical to SEQ ID NO: 297

SEQ ID NO: 309 - protein, 149 aa, human metapneumo virus; identical to SEQ ID NO: 297

SEQ ID NO: 310 - protein, 149 aa, human metapneumo virus; identical to SEQ ID NO: 297

SEQ ID NO: 311 - protein, 149 aa, human metapneumo virus; identical to SEQ ID NO: 297

SEQ ID NO: 312 - protein, 149 aa, human metapneumo virus; identical to SEQ ID NO: 297

SEQ ID NO: 313 - protein, 149 aa, human metapneumo virus; identical to SEQ ID NO: 297

SEQ ID NO: 314 - protein, 539 aa, human metapneumo virus
MSWKVVIIFSLLITPQHGLKESYLEESCSTITEGYLSVLRTGWYTNVFTLEVGDVENLTCADGPSLIKTELDLTKSALRELRTVSADQLAREEQIENPRQSRFVLGAIALGVATAAAVTAGVAIAKTIRLESEVTAIKNALKKTNEAVSTLGNGVRVLATAVRELKDFVSKNLTRAINKNKCDIADLKMAVSFSQFNRRFLNVVRQFSDNAGITPAISLDLMTDAELARAVSNMPTSAGQIKLMLENRAMVRRKGFGILIGVYGSSVIYMVQLPIFGVIDTPCWIVKAAPSCSGKKGNYACLLREDQGWYCQNAGSTVYYPNEKDCETRGDHVFCDTAAGINVAEQSKECNINISTTNYPCKVSTGRHPISMVALSPLGALVACYKGVSCSIGSNRVGIIKQLNKGCSYITNQDADTVTIDNTVYQLSKVEGEQHVIKGRPVSSSFDPVKFPEDQFNVALDQVFESIENSQALVDQSNRILSSAEKGNTGFIIVIILIAVLGSTMILVSVFIIIKKTKKPTGAPPELSGVTNNGFIPHN

SEQ ID NO: 315 - protein, 539 aa, human metapneumo virus
MSWKVVIIFSLLITPQHGLKESYLEESCSTITEGYLSVLRTGWYTNVFTLEVGDVENLTCSDGPSLIKTELDLTKSALRELKTVSADQLAREEQIENPRQSRFVLGAIALGVATAAAVTAGVAIAKTIRLESEVTAIKNALKTTNEAVSTLGNGVRVLATAVRELKDFVSKNLTRAINKNKCDIDDLKMAVSFSQFNRRFLNVVRQFSDNAGITPAISLDLMTDAELARAVSNMPTSAGQIKLMLENRAMVRRKGFGILIGVYGSSVIYTVQLPIFGVIDTPCWIVKAAPSCSEKKGNYACLLREDQGWYCQNAGSTVYYPNEKDCETRGDHVFCDTAAGINVAEQSKECNINISTTNYPCKVSTGRHPISMVALSPLGALVACYKGVSCSIGSNRVGIIKQLNKGCSYITNQDADTVTIDNTVYQLSKVEGEQHVIKGRPVSSSFDPIKFPEDQFNVALDQVFENIENSQALVDQSNRILSSAEKGNTGFIIVIILIAVLGSSMILVSIFIIIKKTKKPTGAPPELSGVTNNGFIPHS

SEQ ID NO: 316 - protein, 539 aa, human metapneumo virus
MSWKVMIIISLLITPQHGLKESYLEESCSTITEGYLSVLRTGWYTNVFTLEVGDVENLTCTDGPSLIKTELDLTKSALRELKTVSADQLAREEQIENPRQSRFVLGAIALGVATAAAVTAGIAIAKTIRLESEVNAIKGALKQTNEAVSTLGNGVRVLATAVRELKEFVSKNLTSAINRNKCDIADLKMAVSFSQFNRRFLNVVRQFSDNAGITPAISLDLMTDAELARAVSYMPTSAGQIKLMLENRAMVRRKGFGILIGVYGSSVIYMVQLPIFGVIDTPCWIIKAAPSCSEKNGNYACLLREDQGWYCKNAGSTVYYPNEKDCETRGDHVFCDTAAGINVAEQSRECNINISTTNYPCKVSTGRHPISMVALSPLGALVACYKGVSCSIGSNWVGIIKQLPKGCSYITNQDADTVTIDNTVYQLSKVEGEQHVIKGRPVSSSFDPIKFPEDQFNVALDQVFESIENSQALVDQSNKILNSAEKGNTGFIIVVILVAVLGLTMISVSIIIIIKKTRKPTGAPPELNGVTNGGFIPHS

SEQ ID NO: 317 - protein, 539 aa, human metapneumo virus
MSWKVMIIISLLITPQHGLKESYLEESCSTITEGYLSVLRTGWYTNVFTLEVGDVENLTCTDGPSLIKTELDLTKSALRELKTVSADQLAREEQIENPRQSRFVLGAIALGVATAAAVTAGIAIAKTIRLESEVNAIKGALKTTNEAVSTLGNGVRVLATAVRELKEFVSKNLTSAINKNKCDIADLKMAVSFSQFNRRFLNVVRQFSDNAGITPAISLDLMTDAELARAVSYMPTSAGQIKLMLENRAMVRRKGFGILIGVYGSSVIYMVQLPIFGVIDTPCWIIKAAPSCSEKDGNYACLLREDQGWYCKNAGSTVYYPNEKDCETRGDHVFCDTAAGINVAEQSRECNINISTTNYPCKVSTGRHPISMVALSPLGALVACYKGVSCSIGSNRVGIIKQLPKGCSYITNQDADTVTIDNTVYQLSKVEGEQHVIKGRPVSSSFDPIRFPEDQFNVALDQVFESIENSQALVDQSNKILNSAEKGNTGFIIVIILIAVLGLTMISVSIIIIIKKTRKPTGAPPELNGVTNGGFIPHS

SEQ ID NO: 318 - DNA, 1620 bp, human metapneumo virus
atgtcttggaaagtggtgatcattttttcattgttaataacacctcaacacggtcttaaagagagctacttagaagagtcatgtagcactataactgaaggatatctcagtgttctgaggacaggttggtacaccaatgtttttacactggaggtaggcgatgtagagaaccttacatgtgccgatggacccagcttaataaaaacagaattagacctgaccaaaagtgcactaagagagctcagaacagtttctgctgatcaactggcaagagaggagcaaattgaaaatcccagacaatctagattcgttctaggagcaatagcactcggtgttgcaactgcagctgcagttacagcaggtgttgcaattgccaaaaccatccggcttgaaagtgaagtaacagcaattaagaatgccctcaaaaagaccaatgaagcagtatctacattggggaatggagttcgtgtgttggcaactgcagtgagagagctgaaagattttgtgagcaagaatctaacacgtgcaatcaacaaaaacaagtgcgacattgctgacctgaaaatggccgttagcttcagtcaattcaacagaaggttcctaaatgttgtgcggcaattttcagacaacgctggaataacaccagcaatatctttggacttaatgacagatgctgaactagccagagctgtttccaacatgccaacatctgcaggacaaataaaactgatgttggagaaccgtgcaatggtaagaagaaaagggttcggaatcctgataggagtttacggaagctccgtaatttacatggtgcaactgccaatctttggggttatagacacgccttgctggatagtaaaagcagccccttcttgttcaggaaaaaagggaaactatgcttgcctcttaagagaagaccaaggatggtattgtcaaaatgcagggtcaactgtttactacccaaatgaaaaagactgtgaaacaagaggagaccatgtcttttgcgacacagcagcaggaatcaatgttgctgagcagtcaaaggagtgcaacataaacatatctactactaattacccatgcaaagttagcacaggaagacatcctatcagtatggttgcactatctcctcttggggctttggttgcttgctacaagggagtgagctgttccattggcagcaacagagtagggatcatcaagcaactgaacaaaggctgctcttatataaccaaccaagacgcagacacagtgacaatagacaacactgtataccagctaagcaaagttgaaggcgaacagcatgttataaaaggaaggccagtgtcaagcagctttgacccagtcaagtttcctgaagatcaattcaatgttgcacttgaccaagttttcgagagcattgagaacagtcaggccttggtggatcaatcaaacagaatcctaagcagtgcagagaaaggaaacactggcttcatcattgtaataattctaattgctgtccttggctctaccatgatcctagtgagtgtttttatcataataaagaaaacaaagaaacccacaggagcacctccagagctgagtggtgtcacaaacaatggcttcataccacataattag

SEQ ID NO: 319 - DNA, 1620 bp, human metapneumo virus
atgtcttggaaagtggtgatcattttttcattgctaataacacctcaacacggtcttaaagagagctacctagaagaatcatgtagcactataactgagggatatcttagtgttctgaggacaggttggtataccaacgtttttacattagaggtgggtgatgtagaaaaccttacatgttctgatggacctagcctaataaaaacagaattagatctgaccaaaagtgcactaagagagctcaaaacagtctctgctgaccaattggcaagagaggaacaaattgagaatcccagacaatctaggtttgttctaggagcaatagcactcggtgttgcaacagcagctgcagtcacagcaggtgttgcaattgccaaaaccatccggcttgagagtgaagtcacagcaattaagaatgccctcaaaacgaccaatgaagcagtatctacattggggaatggagttcgagtgttggcaactgcagtgagagagctaaaagactttgtgagcaagaatttaactcgtgcaatcaacaaaaacaagtgcgacattgatgacctaaaaatggctgttagcttcagtcaattcaacagaaggtttctaaatgttgtgcggcaattttcagacaatgctggaataacaccagcaatatctttggacttaatgacagatgctgaactagccagggccgtttctaacatgccgacatctgcaggacaaataaaattgatgttggagaaccgtgcgatggtgcgaagaaaggggttcggaatcctgataggggtctacgggagctccgtaatttacacggtgcagctgccaatctttggcgttatagacacgccttgctggatagtaaaagcagccccttcttgttccgaaaaaaagggaaactatgcttgcctcttaagagaagaccaagggtggtattgtcagaatgcagggtcaactgtttactacccaaatgagaaagactgtgaaacaagaggagaccatgtcttttgcgacacagcagcaggaattaatgttgctgagcaatcaaaggagtgcaacatcaacatatccactacaaattacccatgcaaagtcagcacaggaagacatcctatcagtatggttgcactgtctcctcttggggctctggttgcttgctacaaaggagtaagctgttccattggcagcaacagagtagggatcatcaagcagctgaacaaaggttgctcctatataaccaaccaagatgcagacacagtgacaatagacaacactgtatatcagctaagcaaagttgagggtgaacagcatgttataaaaggcagaccagtgtcaagcagctttgatccaatcaagtttcctgaagatcaattcaatgttgcacttgaccaagtttttgagaacattgaaaacagccaggccttagtagatcaatcaaacagaatcctaagcagtgcagagaaagggaatactggctttatcattgtaataattctaattgctgtccttggctctagcatgatcctagtgagcatcttcattataatcaagaaaacaaagaaaccaacgggagcacctccagagctgagtggtgtcacaaacaatggcttcataccacacagttag

SEQ ID NO: 320 - DNA, 1620 bp, human metapneumo virus
atgtcttggaaagtgatgatcatcatttcgttactcataacaccccagcacgggctaaaggagagttatttggaagaatcatgtagtactataactgagggatacctcagtgttttaagaacaggctggtacactaatgtcttcacattagaagttggtgatgttgaaaatcttacatgtactgatggacctagcttaatcaaaacagaacttgatctaacaaaaagtgctttaagggaactcaaaacagtctctgctgatcagttggcgagagaggagcaaattgaaaatcccagacaatcaagatttgtcttaggtgcgatagctctcggagttgctacagcagcagcagtcacagcaggcattgcaatagccaaaaccataaggcttgagagtgaggtgaatgcaattaaaggtgctctcaaacaaactaatgaagcagtatccacattagggaatggtgtgcgggtcctagccactgcagtgagagagctaaaagaatttgtgagcaaaaacctgactagtgcaatcaacaggaacaaatgtgacattgctgatctgaagatggctgtcagcttcagtcaattcaacagaagatttctaaatgttgtgcggcagttttcagacaatgcagggataacaccagcaatatcattggacctgatgactgatgctgagttggccagagctgtatcatacatgccaacatctgcagggcagataaaactgatgttggagaaccgcgcaatggtaaggagaaaaggatttggaatcctgataggggtctacggaagctctgtgatttacatggttcaattgccgatctttggtgtcatagatacaccttgttggatcatcaaggcagctccctcttgctcagaaaaaaacgggaattatgcttgcctcctaagagaggatcaagggtggtattgtaaaaatgcaggatctactgtttactacccaaatgaaaaagactgcgaaacaagaggtgatcatgttttttgtgacacagcagcagggatcaatgttgctgagcaatcaagagaatgcaacatcaacatatctactaccaactacccatgcaaagtcagcacaggaagacaccctataagcatggttgcactatcacctctcggtgctttggtggcttgctataaaggggtaagctgctcgattggcagcaattgggttggaatcatcaaacaattacccaaaggctgctcatacataaccaaccaggatgcagacactgtaacaattgacaataccgtgtatcaactaagcaaagttgaaggtgaacagcatgtaataaaagggagaccagtttcaagcagttttgatccaatcaagtttcctgaggatcagttcaatgttgcgcttgatcaagtcttcgaaagcattgagaacagtcaggcactagtggaccagtcaaacaaaattctaaacagtgcagaaaaaggaaacactggtttcattatcgtagtaattttggttgctgttcttggtctaaccatgatttcagtgagcatcatcatcataatcaagaaaacaaggaagcccacaggagcacctccagagctgaatggtgtcaccaacggcggtttcataccacatagttag

SEQ ID NO: 321 - DNA, 1620 bp, human metapneumo virus
atgtcttggaaagtgatgattatcatttcgttactcataacacctcagcacggactaaaagaaagttatttagaagaatcatgtagtactataactgaaggatatctcagtgttttaagaacaggttggtacaccaatgtctttacattagaagttggtgatgttgaaaatcttacatgtactgatggacctagcttaatcaaaacagaacttgacctaaccaaaagtgctctgagagaactcaaaacagtttctgctgatcagttagcgagagaagaacaaattgaaaatcccagacaatcaaggtttgtcctaggtgcaatagctcttggagttgccacagcagcagcagtcacagcaggcattgcaatagccaaaaccataagacttgagagtgaagtgaatgcaatcaaaggtgctctcaaaacaaccaacgaggcagtatccacactaggaaatggagtgcgagtcctagccactgcagtaagagagctgaaagaatttgtgagcaaaaacctgactagtgcgatcaacaagaacaaatgtgacattgctgatctgaagatggctgtcagcttcagtcaattcaacagaagattcctaaatgttgtgcggcagttttcagacaatgcagggataacaccagcaatatcattggacctaatgactgatgctgagctggccagagctgtatcatacatgccaacatctgcaggacagataaaactaatgttagagaaccgtgcaatggtgaggagaaaaggatttggaatcttgataggggtctacggaagctctgtgatttacatggtccagctgccgatctttggtgtcatagatacaccttgttggataatcaaggcagctccctcttgttcagaaaaagatggaaattatgcttgcctcctaagagaggatcaagggtggtattgcaaaaatgcaggatccactgtttactacccaaatgaaaaagactgcgaaacaagaggtgatcatgttttttgtgacacagcagcagggatcaatgttgctgagcaatcaagagaatgcaacatcaacatatctaccaccaactacccatgcaaagtcagcacaggaagacaccctatcagcatggttgcactatcacctctcggtgctttggtagcttgctacaagggggttagctgctcgattggcagtaatcgggttggaataatcaaacaactacctaaaggctgctcatacataactaaccaggacgcagacactgtaacaattgacaacactgtgtatcaactaagcaaagttgagggtgaacagcatgtaataaaagggagaccagtttcaagcagttttgatccaatcaggtttcctgaggatcagttcaatgttgcgcttgatcaagtctttgaaagcattgaaaacagtcaagcactagtggaccagtcaaacaaaattctgaacagtgcagaaaaaggaaacactggtttcattattgtaataattttgattgctgttcttgggttaaccatgatttcagtgagcatcatcatcataatcaaaaaaacaaggaagcccacaggggcacctccagagctgaatggtgttaccaacggcggttttataccgcatagttag

SEQ ID NO: 322 - protein, 236 aa, human metapneumo virus; identical to SEQ ID NO: 119

SEQ ID NO: 323 - protein, 219 aa, human metapneumo virus
MEVKVENIRAIDMLKARVKNRVARSKCFKNASLILIGITTLSIALNIYLIINYTIQKTTSESEHHTSSPPTEPNKEASTISTDNPDINPSSQHPTQQSTENPTLNPAASASPSETEPASTPDTTNRLSSVDRSTAQPSESRTKTKPTVHTINNPNTASSTQSPPRTTTKAIRRATTFRMSSTGKRPTTTLVQSDSSTTTQNHEETGSANPQASASTMQN

SEQ ID NO: 324 - protein, 224 aa, human metapneumo virus
MEVRVENIRAIDMFKAKIKNRIRSSRCYRNATLILIGLTALSMALNIFLIIDHATLRNMIKTENCANMPSAEPSKKTPMTSTAGPNTKPNPQQATQWTTENSTSPVATPEGHPYTGTTQTSDTTAPQQTTDKHTAPLKSTNEQITQTTTEKKTIRATTQKREKGKENTNQTTSTAATQTTNTTNQIRNASETITTSDRPRTDTTTQSSEQTTRATDPSSPPHHA

SEQ ID NO: 325 - protein, 236 aa, human metapneumo virus; identical to SEQ ID NO: 146

SEQ ID NO: 326 - DNA, 708 bp, human metapneumo virus
gaggtgaaagtggagaacattcgaacaatagatatgctcaaagcaagagtaaaaaatcgtgtggcacgcagcaaatgctttaaaaatgcctctttggtcctcataggaataactacattgagtattgccctcaatatctatctgatcataaactataaaatgcaaaaaaacacatctgaatcagaacatcacaccagctcatcacccatggaatccagcagagaaactccaacggtccccacagacaactcagacaccaactcaagcccacagcatccaactcaacagtccacagaaggctccacactctactttgcagcctcagcaagctcaccagagacagaaccaacatcaacaccagatacaacaaaccgcccgcccttcgtcgacacacacacaacaccaccaagcgcaagcagaacaaagacaagtccggcagtccacacaaaaaacaacccaaggacaagctctagaacacattctccaccacgggcaacgacaaggacggcacgcagaaccaccactctccgcacaagcagcacaagaaagagaccgtccacagcatcagtccaacctgacatcagcgcaacaacccacaaaaacgaagaagcaagtccagcgagcccacaaacatctgcaagcacaacaagaatacaaaggaaaagcgtggaggccaacacatcaacaacatacaaccaaactagttaa

SEQ ID NO: 327 - DNA, 660 bp, human metapneumo virus
atggaggtgaaagtagagaacattcgagcaatagacatgctcaaagcaagagtgaaaaatcgtgtggcacgtagcaaatgctttaaaaatgcttctttaatcctcataggaataactacactgagtatagctctcaatatctatctgatcataaactacacaatacaaaaaaccacatccgaatcagaacaccacaccagctcaccacccacagaacccaacaaggaagcttcaacaatctccacagacaacccagacatcaatccaagctcacagcatccaactcaacagtccacagaaaaccccacactcaaccccgcagcatcagcgagcccatcagaaacagaaccagcatcaacaccagacacaacaaaccgcctgtcctccgtagacaggtccacagcacaaccaagtgaaagcagaacaaagacaaaaccgacagtccacacaatcaacaacccaaacacagcttccagtacacaatccccaccacggacaacaacgaaggcaatccgcagagccaccactttccgcatgagcagcacaggaaaaagaccaaccacaacattagtccagtccgacagcagcaccacaacccaaaatcatgaagaaacaggttcagcgaacccacaggcgtctgcaagcacaatgcaaaactag

SEQ ID NO: 328 - DNA, 675 bp, human metapneumo virus
atggaagtaagagtggagaacattcgagcgatagacatgttcaaagcaaagataaaaaaccgtataagaagcagcaggtgctatagaaatgctacactgatccttattggactaacagcgttaagcatggcacttaatattttcctgatcatcgatcatgcaacattaagaaacatgatcaaaacagaaaactgtgctaacatgccgtcggcagaaccaagcaaaaagaccccaatgacctccacagcaggcccaaacaccaaacccaatccacagcaagcaacacagtggaccacagagaactcaacatccccagtagcaaccccagagggccatccatacacagggacaactcaaacatcagacacaacagctccccagcaaaccacagacaaacacacagcaccgctaaaatcaaccaatgaacagatcacccagacaaccacagagaaaaagacaatcagagcaacaacccaaaaaagggaaaaaggaaaagaaaacacaaaccaaaccacaagcacagctgcaacccaaacaaccaacaccaccaaccaaatcagaaatgcaagtgagacaatcacaacatccgacagacccagaactgacaccacaacccaaagcagcgaacagacaacccgggcaacagacccaagctccccaccacaccatgcatag

SEQ ID NO: 329 - DNA, 711 bp, human metapneumo virus
atggaagtaagagtggagaacattcgggcaatagacatgttcaaagcaaaaatgaaaaaccgtataagaagtagcaagtgctatagaaatgctacactgatccttattggattaacagcattaagtatggcacttaatatttttttaatcattgattatgcaatgttaaaaaacatgaccaaagtggaacactgtgttaatatgccgccggtagaaccaagcaagaagaccccaatgacctctgcagtagacttaaacaccaaacccaatccacagcaggcaacacagttggccgcagaggattcaacatctctagcagcaacctcagaggaccatctacacacagggacaactccaacaccagatgcaacagtctctcagcaaaccacagacgagtacacaacattgctgagatcaaccaacagacagaccacccaaacaaccacagagaaaaagccaaccggagcaacaaccaaaaaagaaaccacaactcgaactacaagcacagctgcaacccaaacactcaacactaccaaccaaactagctatgtgagagaggcaaccacaacatccgccagatccagaaacagtgccacaactcaaagcagcgaccaaacaacccaggcagcagacccaagctcccaaccacaccatacacagaaaagcacaacaacaacatacaacacagacacatcctctccaagtagttaa

SEQ ID NO: 330 - protein, 2005 aa, human metapneumo virus
MDPLNESTVNVYLPDSYLKGVISFSETNAIGSCLLKRPYLKNDNTAKVAIENPVIEHVRLKNAVNSKMKISDYKIVEPVNMQHEIMKNVHSCELTLLKQFLTRSKNISTLKLNMICDWLQLKSTSDDTSILSFIDVEFIPSWVSNWFSNWYNLNKLILEFRKEEVIRTGSILCRSLGKLVFVVSSYGCIVKSNKSKRVSFFTYNQLLTWKDVMLSRFNANFCIWVSNSLNENQEGLGLRSNLQGILTNKLYETVDYMLSLCCNEGFSLVKEFEGFIMSEILRITEHAQFSTRFRNTLLNGLTDQLTKLKNKNRLRVHGTVLENNDYPMYEVVLKLLGDTLRCIKLLINKNLENAAELYYIFRIFGHPMVDERDAMDAVKLNNEITKILRWESLTELRGAFILRIIKGFVDNNKRWPKIKNLKVLSKRWTMYFKAKSYPSQLELSEQDFLELAAIQFEQEFSVPEKTNLEMVLNDKAISPPKRLIWSVYPKNYLPEKIKNRYLEETFNASDSLKTRRVLEYYLKDNKFDQKELKSYVVKQEYLNDKDHIVSLTGKERELSVGRMFAMQPGKQRQIQILAEKLLADNIVPFFPETLTKYGDLDLQRIMEIKSELSSIKTRRNDSYNNYIARASIVTDLSKFNQAFRYETTAICADVADELHGTQSLFCWLHLIVPMTTMICAYRHAPPETKGEYDIDKIEEQSGLYRYHMGGIEGWCQKLWTMEAISLLDVVSVKTRCQMTSLLNGDNQSIDVSKPVKLSEGLDEVKADYSLAVKMLKEIRDAYRNIGHKLKEGETYISRDLQFISKVIQSEGVMHPTPIKKILRVGPWINTILDDIKTSAESIGSLCQELEFRGESIIVSLILRNFWLYNLYMHESKQHPLAGKQLFKQLNKTLTSVQRFFEIKKENEVVDLWMNIPMQFGGGDPVVFYRSFYRRTPDFLTEAISHVDILLRISANIRNEAKISFFKALLSIEKNERATLTTLMRDPQAVGSERQAKVTSDINRTAVTSILSLSPNQLFSDSAIHYSRNEEEVGIIADNITPVYPHGLRVLYESLPFHKAEKVVNMISGTKSITNLLQRTSAINGEDIDRAVSMMLENLGLLSRILSVVVDSIEIPTKSNGRLICCQISRTLRETSWNNMEIVGVTSPSITTCMDVIYATSSHLKGIIIEKFSTDRTTRGQRGPKSPWVGSSTQEKKLVPVYNRQILSKQQREQLEAIGKMRWVYKGTPGLRRLLNKICLGSLGISYKCVKPLLPRFMSVNFLHRLSVSSRPMEFPASVPAYRTTNYHFDTSPINQALSERFGNEDINLVFQNAISCGISIMSVVEQLTGRSPKQLVLIPQLEEIDIMPPPVFQGKFNYKLVDKITSDQHIFSPDKIDMLTLGKMLMPTIKGQKTDQFLNKRENYFHGNNLIESLSAALACHWCGILTEQCIENNIFKKDWGDGFISDHAFMDFKIFLCVFKTKLLCSWGSQGKNIKDEDIVDESIDKLLRIDNTFWRMFSKVMFESKVKKRIMLYDVKFLSLVGYIGFKNWFIEQLRSAELHEVPWIVNAEGDLVEIKSIKIYLQLIEQSLFLRITVLNYTDMAHALTRLIRKKLMCDNALLTPIPSPMVNLTQVIDPTEQLAYFPKITFERLKNYDTSSNYAKGKLTRNYMILLPWQHVNRYNFVFSSTGCKVSLKTCIGKLMKDLNPKVLYFIGEGAGNWMARTACEYPDIKFVYRSLKDDLDHHYPLEYQRVIGELSRIIDSGEGLSMETTDATQKTHWDLIHRVSKDALLITLCDAEFKDRDDFFKMVILWRKHVLSCRICTTYGTDLYLFAKYHAKDCNVKLPFFVRSVATFIMQGSKLSGSECYILLTLGHHNNLPCHGEIQNSKMKIAVCNDFYAAKKLDNKSIEANCKSLLSGLRIPINKKELNRQRRLLTLQSNHSSVATVGGSKVIESKWLTNKANTIIDWLEHILNSPKGELNYDFFEALENTYPNMIKLIDNLGNAEIKKLIKVTGYMLVSKK

SEQ ID NO: 331 - protein, 2005 aa, human metapneumo virus
MDPLNESTVNVYLPDSYLKGVISFSETNAIGSCLLKRPYLKNDNTAKVAIENPVIEHVRLKNAVNSKMKISDYKVVEPVNMQHEIMKNVHSCELTLLKQFLTRSKNISTLKLNMICDWLQLKSTSDDTSILSFIDVEFIPSWVSNWFSNWYNLNKLILEFRREEVIRTGSILCRSLGKLVFIVSSYGCIVKSNKSKRVSFFTYNQLLTWKDVMLSRFNANFCIWVSNSLNENQEGLGLRSNLQGMLTNKLYETVDYMLSLCCNEGFSLVKEFEGFIMSEILRITEHAQFSTRFRNTLLNGLTDQLTKLKNKNRLRVHGTVLENNDYPMYEVVLKLLGDTLRCIKLLINKNLENAAELYYIFRIFGHPMVDERDAMDAVKLNNEITKILRLESLTELRGAFILRIIKGFVDNNKRWPKIKNLIVLSKRWTMYFKAKNYPSQLELSEQDFLELAAIQFEQEFSVPEKTNLEMVLNDKAISPPKRLIWSVYPKNYLPETIKNRYLEETFNASDSLKTRRVLEYYLKDNKFDQKELKSYVVRQEYLNDKEHIVSLTGKERELSVGRMFAMQPGKQRQIQILAEKLLADNIVPFFPETLTKYGDLDLQRIMEIKSELSSIKTRRNDSYNNYIARASIVTDLSKFNQAFRYETTAICADVADELHGTQSLFCWLHLIVPMTTMICAYRHAPPETKGEYDIDKIEEQSGLYRYHMGGIEGWCQKLWTMEAISLLDVVSVKTRCQMTSLLNGDNQSIDVSKPVKLSEGLDEVKADYRLAIKMLKEIRDAYRNIGHKLKEGETYISRDLQFISKVIQSEGVMHPTPIKKVLRVGPWINTILDDIKTSAESIGSLCQELEFRGESIIVSLILRNFWLYNLYMHESKQHPLAGKQLFKQLNKTLTSVQRFFEIKKENEVVDLWMNIPMQFGGGDPVVFYRSFYRRTPDFLTEAISHVDILLKISANIKNETKVSFFKALLSIEKNERATLTTLMRDPQAVGSERQAKVTSDINRTAVTSILSLSPNQLFSDSAIHYSRNEEEVGIIAENITPVYPHGLRVLYESLPFHKAEKVVNMISGTKSITNLLQRTSAINGEDIDRAVSMMLENLGLLSRILSVVVDSIEIPIKSNGRLICCQISRTLRETSWNNMEIVGVTSPSITTCMDVIYATSSHLKGIIIEKFSTDRTTRGQRGPKSPWVGSSTQEKKLVPVYNRQILSKQQREQLEAIGKMRWVYKGTPGLRRLLNKICLGSLGISYKCVKPLLPRFMSVNFLHRLSVSSRPMEFPASVPAYRTTNYHFDTSPINQALSERFGNEDINLVFQNAISCGISIMSVVEQLTGRSPKQLVLIPQLEEIDIMPPPVFQGKFNYKLVDKITSDQHIFSPDKIDMLTLGKMLMPTIKGQKTDQFLNKRENYFHGNNLIESLSAALACHWCGILTEQCIENNIFKKDWGDGFISDHAFMDFKIFLCVFKTKLLCSWGSQGKNIKDEDIVDESIDKLLRIDNTFWRMFSKVMFEPKVKKRIMLYDVKFLSLVGYIGFKNWFIEQLRSAELHEIPWIVNAEGDLVEIKSIKIYLQLIEQSLFLRITVLNYTDMAHALTRLIRKKLMCDNALLTPISSPMVNLTQVIDPTTQLDYFPKITFERLKNYDTSSNYAKGKLTRNYMILLPWQHVNRYNFVFSSTGCKVSLKTCIGKLMKDLNPKVLYFIGEGAGNWMARTACEYPDIKFVYRSLKDDLDHHYPLEYQRVIGELSRIIDSGEGLSMETTDATQKTHWDLIHRVSKDALLITLCDAEFKDRDDFFKMVILWRKHVLSCRICTTYGTDLYLFAKYHAKDCNVKLPFFVRSVATFIMQGSKLSGSECYILLTLGHHNSLPCHGEIQNSKMKIAVCNDFYAAKKLDNKSIEANCKSLLSGLRIPINKKELDRQRRLLTLQSNHSSVATVGGSKIIESKWLTNKASTIIDWLEHILNSPKGELNYDFFEALENTYPNMIKLIDNLGNAEIKKLIKVTGYMLVSKK

SEQ ID NO: 332 - protein, 2005 aa, human metapneumo virus
MDPFCESTVNVYLPDSYLKGVISFSETNAIGSCLLKRPYLKNDNTAKVAVENPVVEHVRLRNAVMTKMKISDYKVVEPVNMQHEIMKNIHSCELTLLKQFLTRSKNISSLKLNMICDWLQLKSTSDNTSILNFIDVEFIPVWVSNWFSNWYNLNKLILEFRREEVIRTGSILCRSLGKLVFIVSSYGCVVKSNKSKRVSFFTYNQLLTWKDVMLSRFNANFCIWVSNNLNKNQEGLGLRSNLQGMLTNKLYETVDYMLSLCCNEGFSLVKEFEGFIMSEILKITEHAQFSTRFRNTLLNGLTEQLSVLKAKNRSRVLGTILENNNYPMYEVVLKLLGDTLKSIKLLINKNLENAAELYYIFRIFGHPMVDEREAMDAVKLNNEITKILKLESLTELRGAFILRIIKGFVDNNKRWPKIKNLKVLSKRWAMYFKAKSYPSQLELSVQDFLELAAVQFEQEFSVPEKTNLEMVLNDKAISPPKKLIWSVYPKNYLPETIKNQYLEEAFNASDSQRTRRVLEFYLKDCKFDQKELKRYVIKQEYLNDKDHIVSLTGKERELSVGRMFAMQPGKQRQIQILAEKLLADNIVPFFPETLTKYGDLDLQRIMEIKSELSSIKTRKNDSYNNYIARASIVTDLSKFNQAFRYETTAICADVADELHGTQSLFCWLHLIVPMTTMICAYRHAPPETKGEYDIDKIQEQSGLYRYHMGGIEGWCQKLWTMEAISLLDVVSVKTRCQMTSLLNGDNQSIDVSKPVKLSEGIDEVKADYSLAIRMLKEIRDAYKNIGHKLKEGETYISRDLQFISKVIQSEGVMHPTPIKKILRVGPWINTILDDIKTSAESIGSLCQELEFRGESILVSLILRNFWLYNLYMYESKQHPLAGKQLFKQLNKTLTSVQRFFELKKENDVVDLWMNIPMQFGGGDPVVFYRSFYRRTPDFLTEAISHVDLLLKVSNNIKDETKIRFFKALLSIEKNERATLTTLMRDPQAVGSERQAKVTSDINRTAVTSILSLSPNQLFCDSAIHYSRNEEEVGIIADNITPVYPHGLRVLYESLPFHKAEKVVNMISGTKSITNLLQRTSAINGEDIDRAVSMMLENLGLLSRILSVIINSIEIPIKSNGRLICCQISKTLREKSWNNMEIVGVTSPSIVTCMDVVYATSSHLKGIIIEKFSTDKTTRGQRGPKSPWVGSSTQEKKLVPVYNRQILSKQQKEQLEAIGKMRWVYKGTPGLRRLLNKICIGSLGISYKCVKPLLPRFMSVNFLHRLSVSSRPMEFPASVPAYRTTNYHFDTSPINQALSERFGNEDINLVFQNAISCGISIMSVVEQLTGRSPKQLVLIPQLEEIDIMPPPVFQGKFNYKLVDKITSDQHIFSPDKIDILTLGKMLMPTIKGQKTDQFLNKRENYFHGNNLIESLSAALACHWCGILTEQCIENNIFRKDWGDGFISDHAFMDFKVFLCVFKTKLLCSWGSQGKNVKDEDIIDESIDKLLRIDNTFWRMFSKVMFESKVKKRIMLYDVKFLSLVGYIGFKNWFIEQLRVVELHEVPWIVNAEGELVEIKSIKIYLQLIEQSLSLRITVLNYTDMAHALTRLIRKKLMCDNALFNPSSSPMFNLTQVIDPTTQLDYFPRIIFERLKSYDTSSDYNKGKLTRNYMTLLPWQHVNRYNFVFSSTGCKVSLKTCIGKLIKDLNPKVLYFIGEGAGNWMARTACEYPDIKFVYRSLKDDLDHHYPLEYQRVIGDLNRVIDSGEGLSMETTDATQKTHWDLIHRISKDALLITLCDAEFKNRDDFFKMVILWRKHVLSCRICTAYGTDLYLFAKYHAVDCNIKLPFFVRSVATFIMQGSKLSGSECYILLTLGHHNNLPCHGEIQNSKMRIAVCNDFYASKKLDNKSIEANCKSLLSGLRIPINKKELNRQKKLLTLQSNHSSIATVGGSKIIESKWLKNKASTIIDWLEHILNSPKGELNYDFFEALENTYPNMIKLIDNLGNAEIKKLIKVTGYMLVSKK

SEQ ID NO: 333 - protein, 2005 aa, human metapneumo virus
MDPFCESTVNVYLPDSYLKGVISFSETNAIGSCLLKRPYLKKDNTAKVAVENPVVEHVRLRNAVMTKMKISDYKVVEPINMQHEIMKNIHSCELTLLKQFLTRSKNISSLKLSMICDWLQLKSTSDNTSILNFIDVEFIPVWVSNWFSNWYNLNKLILEFRREEVIRTGSILCRSLGKLVFIVSSYGCVVKSNKSKRVSFFTYNQLLTWKDVMLSRFNANFCIWVSNNLNKNQEGLGFRSNLQGMLTNKLYETVDYMLSLCSNEGFSLVKEFEGFIMSEILKITEHAQFSTRFRNTLLNGLTEQLSMLKAKNRSRVLGTILENNDYPMYEVVLKLLGDTLKSIKLLINKNLENAAELYYIFRIFGHPMVDEREAMDAVKLNNEITKILKLESLTELRGAFILRIIKGFVDNNKRWPKIKNLKVLSKRWVMYFKAKSYPSQLELSVQDFLELAAVQFEQEFSVPEKTNLEMVLNDKAISPPKKLIWSVYPKNYLPEIIKNQYLEEVFNASDSQRTRRVLEFYLKDCKFDQKDLKRYVLKQEYLNDKDHIVSLTGKERELSVGRMFAMQPGKQRQIQILAEKLLADNIVPFFPETLTKYGDLDLQRIMEMKSELSSIKTRKNDSYNNYIARASIVTDLSKFNQAFRYETTAICADVADELHGTQSLFCWLHLIVPMTTMICAYRHAPPETKGEYDIDKIEEQSGLYRYHMGGIEGWCQKLWTMEAISLLDVVSVKTRCQMTSLLNGDNQSIDVSKPVKLSEGIDEVKADYSLAIKMLKEIRDAYKNIGHKLKEGETYISRDLQFISKVIQSEGVMHPTPIKKILRVGPWINTILDDIKTSAESIGSLCQELEFRGESMLVSLILRNFWLYNLYMHESKQHPLAGKQLFKQLNKTLTSVQRFFELKKENDVVDLWMNIPMQFGGGDPVVFYRSFYRRTPDFLTEAISHVDLLLKVSNNIKNETKIRFFKALLSIEKNERATLTTLMRDPQAVGSERQAKVTSDINRTAVTSILSLSPNQLFCDSAIHYSRNEEEVGIIADNITPVYPHGLRVLYESLPFHKAEKVVNMISGTKSITNLLQRTSAINGEDIDRAVSMMLENLGLLSRILSVIINSIEIPIKSNGRLICCQISKTLREKSWNNMEIVGVTSPSIVTCMDVVYATSSHLKGIIIEKFSTDKTTRGQRGPKSPWVGSSTQEKKLVPVYNRQILSKQQKEQLEAIGKMRWVYKGTPGLRRLLNKICIGSLGISYKCVKPLLPRFMSVNFLHRLSVSSRPMEFPASVPAYRTTNYHFDTSPINQALSERFGNEDINLVFQNAISCGISIMSVVEQLTGRSPKQLVLIPQLEEIDIMPPPVFQGKFNYKLVDKITSDQHIFSPDKIDILTLGKMLMPTIKGQKTDQFLNKRENYFHGNNLIESLSAALACHWCGILTEQCVENNIFRKDWGDGFISDHAFMDFKIFLCVFKTKLLCSWGSQGKNVKDEDIIDESIDKLLRIDNTFWRMFSKVMFESKVKKRIMLYDVKFLSLVGYIGFKNWFIEQLRVVELHEVPWIVNAEGELVEIKPIKIYLQLIEQSLSLRITVLNYTDMAHALTRLIRKKLMCDNALFNPSSSPMFSLTQVIDPTTQLDYFPKVIFERLKSYDTSSDYNKGKLTRNYMTLLPWQHVNRYNFVFSSTGCKISLKTCIGKLIKDLNPKVLYFIGEGAGNWMARTACEYPDIKFVYRSLKDDLDHHYPLEYQRVIGDLNRVIDGGEGLSMETTDATQKTHWDLIHRISKDALLITLCDAEFKNRDDFFKMVILWRKHVLSCRICTAYGTDLYLFAKYHATDCNIKLPFFVRSVATFIMQGSKLSGSECYILLTLGHHNNLPCHGEIQNSKMRIAVCNDFHASKKLDNKSIEANCKSLLSGLRIPINKKELNRQKKLLTLQSNHSSIATVGGSKIIESKWLKNKASTIIDWLEHILNSPKGELNYDFFEALENTYPNMIKLIDNLGNAEIKKLIKVPGYMLVSKK

SEQ ID NO: 334 - DNA, 6018 bp, human metapneumo virus
atggatcctctcaatgaatccactgttaatgtctatcttcctgactcatatcttaaaggagtgatttcctttagtgagactaatgcaattggttcatgtctcttaaaaagaccttacctaaaaaatgacaacactgcaaaagttgccatagagaatcctgttatcgagcatgttagactcaaaaatgcagtcaattctaagatgaaaatatcagattacaagatagtagagccagtaaacatgcaacatgaaattatgaagaatgtacacagttgtgagctcacattattaaaacagtttttaacaaggagtaaaaatattagcactctcaaattaaatatgatatgtgattggctgcagttaaagtctacatcagatgatacctcaatcctaagttttatagatgtagaatttatacctagctgggtaagcaattggtttagtaattggtacaatctcaacaagttgattctggaattcaggaaagaagaagtaataagaactggttcaatcttgtgtaggtcattgggtaaattagtttttgttgtatcatcatatggatgtatagtcaagagcaacaaaagcaaaagagtgagcttcttcacatacaatcaactgttaacatggaaagatgtgatgttaagtagattcaatgcaaatttttgtatatgggtaagcaacagtctgaatgaaaatcaagaagggctagggttgagaagtaatctgcaaggcatattaactaataagctatatgaaactgtagattatatgcttagtttatgttgcaatgaaggtttctcacttgtgaaagagttcgaaggctttattatgagtgaaattcttaggattactgaacatgctcaattcagtactagatttagaaatactttattaaatggattaactgatcaattaacaaaattaaaaaataaaaacagactcagagttcatggtaccgtgttagaaaataatgattatccaatgtacgaagttgtacttaagttattaggagatactttgagatgtattaaattattaatcaataaaaacttagagaatgctgctgaattatactatatatttagaatattcggtcacccaatggtagatgaaagagatgcaatggatgctgtcaaattaaacaatgaaatcacaaaaatccttaggtgggagagcttgacagaactaagaggggcattcatattaaggattatcaaaggatttgtagacaacaacaaaagatggcccaaaattaaaaacttaaaagtgcttagtaagagatggactatgtacttcaaagcaaaaagttaccccagtcaacttgaattaagcgaacaagattttttagagcttgctgcaatacagtttgaacaagagttttctgtccctgaaaaaaccaaccttgagatggtattaaatgataaagctatatcacctcctaaaagattaatatggtctgtgtatccaaaaaattacttacctgagaaaataaaaaatcgatatctagaagagactttcaatgcaagtgatagtctcaaaacaagaagagtactagagtactatttgaaagataataaattcgaccaaaaagaacttaaaagttatgttgttaaacaagaatatttaaatgataaggatcatattgtctcgctaactggaaaagaaagagaattaagtgtaggtagaatgtttgctatgcaaccaggaaaacagcgacaaatacaaatattggctgaaaaattgttagctgataatattgtaccttttttcccagaaaccttaacaaagtatggtgatctagatcttcagagaataatggaaatcaaatcggaactttcttctattaaaactagaagaaatgatagttataataattacattgcaagagcatccatagtaacagatttaagtaagttcaaccaagcctttaggtatgaaactacagcgatctgtgcggatgtagcagatgaactacatggaacacaaagcctattctgttggttacatcttatcgtccctatgacaacaatgatatgtgcctatagacatgcaccaccagaaacaaaaggtgaatatgatatagataagatagaagagcaaagtggtttatatagatatcatatgggtggtattgaaggatggtgtcaaaaactctggacaatggaagctatatctctattagatgttgtatctgtaaaaacacgatgtcaaatgacatctttattaaacggtgacaaccaatcaatagatgtaagtaaaccagttaagttatctgagggtttagatgaagtgaaagcagattatagcttggctgtaaaaatgttaaaagaaataagagatgcatacagaaatataggccataaacttaaagaaggggaaacatatatatcaagagatcttcagtttataagtaaggtgattcaatctgaaggagtaatgcatcctacccctataaaaaagatcttaagagtgggaccatggataaacacaatattagatgacattaaaaccagtgcagagtcaatagggagtctatgtcaggaattagaatttaggggggaaagcataatagttagtctgatattaaggaatttttggctgtataatttatacatgcatgaatcaaagcaacaccccctagcagggaagcagttattcaaacaactaaataaaacattaacatcagtgcagagattttttgaaataaaaaaggaaaatgaagtagtagatctatggatgaacataccaatgcagtttggaggaggagatccagtagtcttctatagatctttctatagaaggacccctgattttttaactgaagcaatcagtcatgtggatattctgttaagaatatcagccaacataagaaatgaagcgaaaataagtttcttcaaagccttactgtcaatagaaaaaaatgaacgtgctacactgacaacactaatgagagatcctcaagctgttggctcagagcgacaagcaaaagtaacaagtgatatcaatagaacagcagttaccagcatcttaagtctttctccaaatcaacttttcagcgatagtgctatacactacagtagaaatgaagaagaggtcggaatcattgctgacaacataacacctgtttatcctcatggactgagagttttgtatgaatcattaccttttcataaagctgaaaaagttgtgaatatgatatcaggaacgaaatccataaccaacttattacagagaacatctgctattaatggtgaagatattgacagagctgtatccatgatgctggagaacctaggattattatctagaatattgtcagtagttgttgatagtatagaaattccaaccaaatctaatggtaggctgatatgttgtcagatatctagaaccctaagggagacatcatggaataatatggaaatagttggagtaacatcccctagcatcactacatgcatggatgtcatatatgcaactagctctcatttgaaagggataatcattgaaaagttcagcactgacagaactacaagaggtcaaagaggtccaaagagcccttgggtagggtcgagcactcaagagaaaaaattagttcctgtttataacagacaaattctttcaaaacaacaaagagaacagctagaagcaattggaaaaatgagatgggtatataaagggacaccaggtttaagacgattactcaataagatttgtcttggaagtttaggcattagttacaaatgtgtaaaacctttattacctaggtttatgagtgtaaatttcctacacaggttatctgtcagtagtagacctatggaattcccagcatcagttccagcttatagaacaacaaattaccattttgacactagtcctattaatcaagcactaagtgagagatttgggaatgaagatattaatttggtcttccaaaatgcaatcagctgtggaattagcataatgagtgtagtagaacaattaactggtaggagtccaaaacagttagttttaatacctcaattagaagaaatagacattatgccaccaccagtgtttcaagggaaattcaattataagctagtagataagataacttctgatcaacatatcttcagtccagacaaaatagatatgttaacactggggaaaatgctcatgcccactataaaaggtcagaaaacagatcagttcctgaacaagagagagaattatttccatgggaataatcttattgagtctttgtcagcagcgttagcatgtcattggtgtgggatattaacagagcaatgtatagaaaataatattttcaagaaagactggggtgacgggttcatatcggatcatgcttttatggacttcaaaatattcctatgtgtctttaaaactaaacttttatgtagttgggggtcccaagggaaaaacattaaagatgaagatatagtagatgaatcaatagataaactgttaaggattgataatactttttggagaatgttcagcaaggttatgtttgaatcaaaggttaagaaaaggataatgttatatgatgtaaaatttctatcattagtaggttatatagggtttaagaattggtttatagaacagttgagatcagctgagttgcatgaggtaccttggattgtcaatgccgaaggtgatctggttgagatcaagtcaattaaaatctatttgcaactgatagagcaaagtttatttttaagaataactgttttgaactatacagatatggcacatgctctcacaagattaatcagaaagaagttgatgtgtgataatgcactattaactccgattccatccccaatggttaatttaactcaagttattgatcctacagaacaattagcttatttccctaagataacatttgaaaggctaaaaaattatgacactagttcaaattatgctaaaggaaagctaacaaggaattacatgatactgttgccatggcaacatgttaatagatataactttgtctttagttctactggatgtaaagttagtctaaaaacatgcattggaaaacttatgaaagatctaaaccctaaagttctgtactttattggagaaggggcaggaaattggatggccagaacagcatgtgaatatcctgacatcaaatttgtatacagaagtttaaaagatgaccttgatcatcattatcctttggaataccagagagttataggagaattaagcaggataatagatagcggtgaagggctttcaatggaaacaacagatgcaactcaaaaaactcattgggatttgatacacagagtaagcaaagatgctttattaataactttatgtgatgcagaatttaaggacagagatgatttttttaagatggtaattctatggaggaaacatgtattatcatgcagaatttgcactacttatgggacagacctctatttattcgcaaagtatcatgctaaagactgcaatgtaaaattacctttttttgtgagatcagtagccacctttattatgcaaggtagtaaactgtcaggctcagaatgctacatactcttaacactaggccaccacaacaatttaccctgccatggagaaatacaaaattctaagatgaaaatagcagtgtgtaatgatttttatgctgcaaaaaaacttgacaataaatctattgaagccaactgtaaatcacttttatcagggctaagaataccgataaataagaaagaattaaatagacagagaaggttattaacactacaaagcaaccattcttctgtagcaacagttggaggtagcaaggtcatagagtctaaatggttaacaaacaaggcaaacacaataattgattggttagaacatattttaaattctccaaaaggtgaattaaattatgatttttttgaagcattagaaaatacttaccctaatatgattaaactaatagataatctagggaatgcagagataaaaaaactgatcaaagtaactggatatatgcttgtaagtaaaaaatga

SEQ ID NO: 335 - DNA, 6018 bp, human metapneumo virus
atggatcctcttaatgaatccactgttaatgtctatctccctgattcgtaccttaaaggagtaatttcttttagtgaaactaatgcaattggttcatgtctcttaaaaagaccttacttaaaaaatgacaacactgcaaaagttgccatagagaatcctgttattgagcatgtgagactcaaaaatgcagtcaattctaaaatgaaaatatcagattacaaggtagtagagccagtaaacatgcaacatgaaataatgaagaatgtacacagttgtgagctcacactattgaaacagtttttaacaaggagtaaaaacattagcactctcaaattaaatatgatatgtgattggctgcaattaaagtctacatcagatgatacctcaatcctaagtttcatagatgtagaatttatacctagttgggtaagcaactggtttagtaattggtacaatctcaataagttaattttggaattcagaagagaggaagtaataagaaccggttcaatcttatgcaggtcattgggtaaattagtttttattgtatcatcatacggatgtatcgtcaagagcaacaaaagcaaaagagtgagcttcttcacatacaatcaactgttaacatggaaagatgtgatgttaagtagatttaatgcgaatttttgtatatgggtaagcaatagtctgaatgaaaatcaggaagggctagggttaagaagtaatctacaaggtatgttaactaataaactatatgaaactgtagattatatgctaagtttatgttgcaatgaaggtttctcacttgtaaaagagttcgaaggttttattatgagtgaaatccttaggattactgaacatgctcaattcagtactagatttagaaatactttattaaatggattaacagatcaattaacaaaattaaaaaataaaaacagactcagagttcatggtaccgtattagaaaataatgattatccaatgtatgaagttgtacttaaattattaggagatactttgagatgtatcaaattattaatcaataaaaacttagagaatgctgcagaattatactatatattcagaatttttggtcatccaatggtagatgaaagagatgcaatggatgctgtcaaattaaacaatgaaatcacaaaaatcctaaggttggagagcttgacagaactaagaggagcattcatattaaggattatcaaaggatttgtggacaacaacaaaaggtggcccaaaattaaaaatttaatagtgcttagcaaaagatggactatgtacttcaaagctaaaaattatcccagtcaactcgaattaagtgaacaagactttctagagcttgctgcaatacaatttgaacaagagttttctgttcctgaaaaaaccaatcttgagatggtattaaatgacaaagccatatcacctcctaaaagattaatatggtctgtgtatccaaagaattacttacctgagacgataaaaaatcgatatttagaagaaactttcaatgcgagtgatagtctcaaaacaagaagagtactagagtactatttaaaagacaataaatttgatcaaaaggaacttaaaagttatgtagttagacaagaatatttaaatgataaggagcacattgtctcattaactggaaaagaaagagaattaagtgtaggtagaatgtttgctatgcaaccaggaaaacagcgacaaatacaaatattggcagaaaaattgttagctgataacattgtacctttcttcccggaaaccttaacaaagtatggtgatctagatcttcagagaataatggaaatcaaatcagaactttcttctatcaaaaccagaagaaatgacagttataataattacattgcaagagcatccatagtaacagatttgagcaagttcaaccaagcctttagatatgaaactacagcgatctgtgcggatgtagcagacgaattacatggaacacaaagcttattctgttggttacatcttatcgttcctatgactacaatgatatgtgcctatagacatgcaccaccagaaacaaaaggtgaatatgatatagataagatagaagagcaaagtggtctatatagatatcacatgggcggtattgaaggatggtgtcaaaaactctggacaatggaagctatatctttattggatgttgtatctgtaaagacacggtgtcaaatgacatctttattaaacggtgataaccaatcaatagatgtaagtaaaccagtcaagttatctgaaggtttagatgaagtgaaggcagattatcgcttagcaataaaaatgctaaaagaaataagagatgcatacagaaatataggccataaacttaaagaaggggaaacatatatatcaagggatcttcaatttataagcaaggtgattcaatctgaaggagtgatgcatcctacccctataaaaaaggtcttgagagtaggaccatggataaacacaatattagatgacattaaaactagtgctgagtcaatagggagtctatgtcaagaattagaatttaggggagaaagcataatagttagtctgatattaagaaacttctggctgtataacttatacatgcatgaatcaaagcaacatcctttggcagggaaacagttattcaaacaactaaataaaacattaacatcagtgcagagattttttgaaattaaaaaggaaaatgaggtagtagatctatggatgaacataccaatgcaatttggaggaggagatccagtagtcttctatagatctttctatagaaggacccctgattttttaactgaggcaatcagccatgtagatattctgttaaaaatatcagctaacataaaaaatgaaacgaaagtaagtttcttcaaagccttactatcaatagaaaaaaatgaacgtgctacactgacaacgctaatgagagatcctcaagctgttggatcagaacgacaagcaaaagtaacaagtgacatcaatagaacagcagttaccagtatcttaagtctttccccaaatcaacttttcagtgatagtgctatacactatagcaggaatgaagaagaagtgggaatcattgcagaaaacataacacctgtttatcctcatgggctgagagtattatatgaatcattgccctttcacaaagctgaaaaagttgtaaacatgatatcagggacaaaatctataaccaacttattacagagaacatccgctattaatggtgaagatattgacagggctgtatctatgatgttggagaatctaggattattatctagaatattgtcagtagttgttgatagtatagaaattccaatcaaatctaatggtaggctgatatgttgtcaaatctctaggactttaagagagacatcatggaataatatggaaatagttggagtaacatctcctagcatcactacatgtatggatgtcatatatgcaactagttctcatttgaaggggataattatagaaaagttcagcactgacagaactacaaggggtcaaagaggtccaaaaagcccttgggtagggtcgagtactcaagagaaaaaattagtacctgtttataacagacaaattctttcaaaacaacaaagagaacagctagaagcaattggaaaaatgagatgggtgtataaagggacaccaggcttgcgacgattactcaacaagatctgtcttgggagtttaggcattagttacaaatgtgtaaaacctttattacctaggtttatgagtgtaaatttcttacataggttatctgtcagtagtagacctatggaattcccagcatcagttccagcttatagaacaacaaattaccatttcgacactagtcctattaatcaagcactaagtgagagatttgggaatgaagatattaacttggtcttccaaaatgcgatcagctgtggaattagcataatgagtgtagtagaacaattaacaggtagaagcccaaaacagttagttttaataccccaattagaagaaatagacattatgccaccaccagtgtttcaagggaaattcaattataaattagtagataagataacttctgatcaacatatcttcagtccggacaaaatagatatgttaacactagggaaaatgctcatgcctactataaaaggtcagaaaacagatcagttcttaaataagagagagaattatttccatgggaacaatcttattgagtctttatcagcagcattagcatgtcattggtgtgggatattaacagaacaatgcatagaaaataatattttcaagaaggactggggtgacgggtttatatcagatcatgcttttatggacttcaaaatattcctatgtgtctttaaaactaaacttttatgtagttggggatcccaagggaaaaacattaaagatgaagatatagtagatgaatcaatagataaattgttaaggattgacaatactttttggagaatgttcagcaaagttatgtttgaaccaaaagttaagaaaaggataatgttatatgatgtaaaattcctatcactagtaggctacatagggtttaagaactggtttatagagcagttgagatcagctgaattgcatgaaataccttggattgtcaatgccgaaggtgatttggttgagatcaagtcaattaaaatctatttgcaactgatagaacaaagcttatttttaagaataactgttttgaactatacagatatggcacatgctctcacacgattaatcagaaagaagttaatgtgtgataatgcactgttaaccccaatttcatccccaatggttaacttaactcaagttattgatcccacaacacaattagattacttccccaagataacattcgaaaggctaaaaaattatgacacaagttcaaattatgctaaaggaaagctaacaagaaattacatgatactattgccatggcagcatgttaatagatataactttgtctttagttctactggatgtaaagttagtctgaaaacatgtattggaaaacttatgaaagacttaaatcctaaagttttgtactttattggagaaggagcaggaaattggatggccagaacagcatgtgaatatcctgatattaaatttgtatatagaagtctgaaagatgaccttgatcatcattatcctctggaataccagagagtgataggtgaattaagcagaatcatagatagtggtgaaggactttcaatggaaacaacagacgcaactcaaaaaactcattgggatttgatacacagggtaagcaaagatgctttattaataactttatgtgatgcagaatttaaggacagagatgatttttttaagatggtaattctatggagaaaacatgtattatcatgcagaatttgcactacttatgggacggacctctatttattcgcaaagtatcatgctaaagactgcaatgtaaaattacctttttttgtgagatcagttgctactttcattatgcagggtagtaagctgtcaggttcagaatgctacatactcttaacactaggccaccacaacagtttaccttgccatggagaaatacaaaattctaagatgaaaatagcagtgtgtaatgatttttatgctgcaaaaaaactcgacaataaatcaattgaagctaattgtaaatcacttttgtcagggctaagaatacctataaataagaaggaactagatagacagagaagattattaacactacaaagcaatcattcttctgtggcaacagttggcggtagcaagatcatagagtctaaatggttaacaaacaaagcaagtacaataattgattggttagaacatattttaaattctccaaagggcgaattaaattatgatttttttgaagcattggagaacacttaccctaatatgattaaactaatagataacttagggaatgcagagattaaaaaacttatcaaagtaacaggatacatgcttgtaagtaaaaaatga

SEQ ID NO: 336 - DNA, 6018 bp, human metapneumo virus
atggatcccttttgtgaatctactgttaatgtttatctccctgattcatatctcaaaggagtaatatcttttagtgaaaccaatgcaattggatcatgtcttttgaaaagaccctatctaaaaaatgacaacactgccaaagttgctgtagaaaaccctgttgttgaacatgtgaggcttagaaatgcagtcatgaccaaaatgaagatatcagattataaagtggttgaaccagttaatatgcagcatgaaataatgaaaaatatacatagttgtgagcttacattattaaaacaattcttaacgagaagcaaaaacattagctctctaaaattaaatatgatatgtgattggttacagttaaaatccacttcagataacacatcaattctcaattttatagatgtggagttcatacccgtttgggtaagcaattggttcagtaactggtataatctcaataaattaatcttagagtttagaagagaagaagtaataagaactggttcaattttatgtagatcactaggcaagttagtttttattgtatcatcttatggatgtgtagtaaaaagcaacaaaagtaaaagagtgagctttttcacctataaccaactgttaacatggaaagatgtgatgttaagtagattcaatgcaaacttttgtatatgggtaagtaacaacctgaacaaaaatcaagaaggactaggacttagaagcaatctgcaaggtatgttaaccaataaattatatgaaactgttgattacatgctaagcctatgctgcaatgaaggattctctctggtgaaagagtttgaaggatttattatgagtgaaattctaaaaattactgagcatgctcagttcagtactaggtttaggaatactttattgaatgggttaactgaacaattatcagtgttgaaagctaagaacagatctagagttcttggaactatattagaaaacaacaattaccctatgtacgaagtagtacttaaattattaggggacaccttgaaaagcataaagttattaattaacaagaatttagaaaatgctgcagaattatattatatattcagaatttttggacaccctatggtagatgagagggaagcaatggatgctgttaaattaaacaatgagattacaaaaattcttaaattagagagtttaacagaactaagaggagcatttatactaagaattataaaagggtttgtagacaataataaaagatggcctaaaattaagaatttaaaagtgctcagcaaaagatgggctatgtatttcaaagctaaaagttaccctagccaacttgagctaagtgtacaagattttttagaacttgctgcagtacaatttgagcaggaattctctgtacctgaaaaaaccaaccttgagatggtattaaatgataaagcaatatcacctccaaaaaagctaatatggtctgtatatccaaaaaactacctgcctgaaactataaaaaatcaatatttagaagaggctttcaatgcaagtgacagccaaagaacaaggagagtcttagaattttacttaaaagattgtaaatttgatcaaaaagaacttaaacgttatgtaattaaacaagagtatctgaatgacaaagaccacattgtctcgttaactgggaaggaaagagaattaagtgtaggtaggatgtttgcaatgcaaccaggaaaacaaagacagatacagatattagctgagaaacttctagctgataatattgtaccttttttcccagaaactttaacaaagtatggtgacttagatctccaaagaattatggaaataaaatcagaactttcttccattaaaactagaaagaatgatagctacaacaattatattgcaagggcctctatagtaacagacttaagtaagttcaatcaggcctttagatatgaaaccacagctatatgtgcagatgtagctgatgagttacatgggacacaaagcttattctgttggttacatcttattgttcccatgactacaatgatatgtgcatacagacatgcaccaccagaaacaaaaggggaatatgatatagacaaaatacaagagcaaagcggattatacagatatcatatgggagggattgaagggtggtgccagaagttatggacaatggaagcaatatccttgttagatgtagtatctgtgaagactcgctgtcagatgacctctctattaaacggagacaatcagtcaatagatgttagtaaaccagtaaaattgtctgaaggtatagatgaagtaaaagcagactatagcttagcaattagaatgcttaaagaaataagagatgcttataaaaacattggtcataaactcaaagaaggtgaaacatatatatcaagggatctccaatttataagtaaggtgattcaatctgaaggagtcatgcatcctacccctataaaaaagatattaagagtaggtccttggataaatacaatactagatgatattaaaaccagtgcagaatcaataggaagtctatgtcaagaactagaattcagaggggagagtatactagttagcttgatattaaggaatttctggctgtataacttgtacatgtatgagtcaaaacagcacccattagctgggaagcaactgttcaagcaattgaacaaaacattaacatctgtgcagagattttttgaactgaagaaagaaaatgatgtggttgacctatggatgaatataccaatgcagtttggagggggagatccagtagttttttacagatctttttacagaaggactcccgatttcctaactgaagcaatcagccatgtggatttactgttaaaagtgtcaaacaatatcaaagatgagactaagatacgatttttcaaagccttattatctatagaaaagaatgaacgtgctacattaacaacactaatgagagaccctcaggcagtaggatcagaacgacaagctaaggtaacaagtgatataaatagaacagcagttaccagcatactgagtctatctccgaatcagctcttctgtgatagtgctatacattatagtagaaatgaggaagaagttgggatcattgcagacaacataacacctgtctatcctcatgggctgagagtgctctatgaatcactaccttttcataaggctgaaaaggttgtcaatatgatatcaggcacaaagtctataactaatctattacagagaacatctgctatcaatggtgaagatattgatagagcagtgtctatgatgttagagaacttagggttgttatctagaatattgtcagtaataattaatagtatagaaataccaatcaagtccaatggcagattgatatgctgtcaaatttccaagaccttgagagaaaaatcatggaacaatatggaaatagtaggagtgacatctcctagtattgtgacatgtatggatgttgtgtatgcaactagttctcatttaaaaggaataattattgaaaaattcagtactgacaagaccacaagaggtcagaggggaccaaaaagcccctgggtaggatcaagcactcaagagaaaaaattggttcctgtttataatagacaaattctttcaaaacaacaaaaagagcaactggaagcaatagggaaaatgaggtgggtgtacaaaggaactccagggctaagaagattgctcaacaagatttgcataggaagcttaggtattagctataaatgtgtgaaacctttattaccaagattcatgagtgtaaacttcttacataggttatctgttagtagtagacccatggaattcccagcttctgttccagcttacaggacaacaaattaccattttgacactagtccaatcaaccaagcattaagtgagaggttcgggaacgaagacattaatttagtgttccaaaatgcaatcagctgcggaattagtataatgagtgttgtagaacagttaactggtagaagcccaaaacaattagtcctaatccctcaattagaagagatagatattatgcctcctcctgtatttcaaggaaaattcaattataaactagttgataagataacctccgatcaacacatcttcagtcctgacaaaatagacatattaacactagggaagatgcttatgcctaccataaaaggtcaaaaaactgatcagttcttaaataagagagaaaactattttcatggaaataatttaattgaatctttatctgcagcacttgcatgccactggtgtgggatattaacagaacagtgcatagaaaacaatatctttaggaaagattggggtgatgggttcatctcagatcatgccttcatggatttcaaggtatttctatgtgtatttaaaaccaaacttttatgtagttggggatctcaaggaaagaatgtaaaagatgaagatataatagatgaatccattgacaaattattaagaattgacaacaccttttggagaatgttcagcaaagtcatgtttgaatcaaaagtcaaaaaaagaataatgttatatgatgtgaaattcctatcattagtaggttatataggatttaaaaactggtttatagaacagttaagagtggtagaattgcatgaggtaccttggattgtcaatgctgaaggagagttagttgaaattaaatcaatcaaaatttatctgcagttaatagaacaaagtctatctttgagaataactgtattgaattatacagacatggcacatgctcttacacgattaattaggaaaaaattgatgtgtgataatgcactctttaatccaagttcatcaccaatgtttaatctaactcaggttattgatcccacaacacaactagactattttcctaggataatatttgagaggttaaaaagttatgataccagttcagactacaacaaagggaagttaacaaggaattacatgacattattaccatggcaacacgtaaacaggtacaattttgtctttagttctacaggttgtaaagtcagtttgaagacatgcatcgggaaattgataaaggatttaaatcctaaagttctttactttattggagaaggagcaggtaactggatggcaagaacagcatgtgaatatcctgatataaaatttgtatataggagtttaaaggatgaccttgatcaccattacccattagaatatcaaagggtaataggtgatctaaatagggtgatagatagtggtgaaggattatcaatggaaaccacagatgcaactcaaaaaactcattgggacttgatacacagaataagtaaagatgctttattgataacattgtgtgatgcagaattcaaaaacagagatgatttctttaagatggtaatcctttggagaaaacatgtattatcttgtagaatctgtacagcttatggaacagatctttacttatttgcaaagtatcatgcggtggactgcaatataaaattaccattttttgtaagatctgtagctacttttattatgcaaggaagcaaattatcagggtcagaatgttacatacttttaacattaggtcatcacaataatctaccctgtcatggagaaatacaaaattccaaaatgagaatagcagtgtgtaatgatttctatgcctcaaagaaactggacaacaaatcaattgaagcaaactgcaaatctcttctatcaggattgagaatacctataaacaaaaaggagttaaatagacaaaagaaattgttaacactacaaagtaaccattcttctatagcaacagttggcggcagtaagattatagaatccaaatggttaaagaataaagcaagtacaataattgattggttagagcatattttgaattctccaaaaggtgaattaaactatgatttctttgaagcattagagaacacataccccaatatgatcaagcttatagataatttgggaaatgcagaaataaagaaactaatcaaggtcactgggtatatgcttgtgagtaagaagtaa

SEQ ID NO: 337 - DNA, 6018 bp, human metapneumo virus
atggatccattttgtgaatccactgtcaatgtttatcttcctgactcatatctcaaaggagtaatatctttcagtgaaaccaatgcaattggctcatgccttttgaaaagaccctatctaaaaaaagataacactgctaaagttgctgtagaaaaccctgttgttgaacatgtcaggcttagaaatgcagtcatgaccaaaatgaagatatcagattataaagtggttgaaccaattaatatgcagcatgaaataatgaaaaatatacacagttgtgagctcacattattaaaacaattcttaacaagaagtaaaaacattagctctctaaaattaagtatgatatgtgattggttacagttaaaatccacctcagataacacatcaattcttaattttatagatgtggagtttatacctgtttgggtgagcaattggtttagtaactggtataatctcaataaattaatcttagagtttagaagagaggaagtaataagaactggttcaattttatgtagatcactaggcaagttagttttcattgtatcatcttatgggtgtgtagtaaaaagcaacaaaagtaaaagagtaagttttttcacatataaccaactgttaacatggaaagatgtgatgttaagtaggttcaatgcaaacttttgtatatgggtaagtaacaacctgaacaaaaatcaagaaggactaggatttagaagtaatctgcaaggtatgttaaccaataaattatatgaaactgttgattatatgttaagtctatgtagtaatgaagggttctcactagtgaaagagttcgaaggctttattatgagtgaaattcttaaaattactgagcatgctcaattcagtactaggtttaggaatactttattaaatgggttgactgaacaattatcaatgttgaaagctaaaaacagatctagagttcttggcactatattagaaaacaatgattaccccatgtatgaagtagtacttaaattattaggggacactttgaaaagtataaaattattaattaacaagaatttagaaaatgctgcagaattatattatatattcagaatttttggacaccctatggtagatgagagggaagcaatggatgctgttaaattaaataatgagattacaaaaattcttaaactggagagcttaacagaactaagaggagcatttatactaagaattataaaagggtttgtagataataataaaagatggcctaaaattaagaatttaaaagtgctcagtaaaagatgggttatgtatttcaaagccaaaagttaccctagccaacttgagctaagtgtacaagattttttagaacttgctgcagtacaattcgaacaggaattttctgtccctgaaaaaaccaaccttgagatggtattaaatgataaagcaatatctcctccaaaaaagttaatatggtcggtatatccaaaaaattatctacctgaaattataaaaaatcaatatttagaagaggtcttcaatgcaagtgacagtcaaagaacgaggagagtcttagaattttacttaaaagattgcaaatttgatcaaaaagaccttaaacgttatgtacttaaacaagagtatctaaatgacaaagaccacattgtctcattaactgggaaggaaagagaattaagtgtaggcaggatgtttgcaatgcaaccaggcaaacaaagacaaatacagatactagctgagaaacttctagctgataatattgtaccctttttcccagaaactttaacaaagtatggtgacttggatctccaaagaattatggaaatgaaatcagaactttcttccattaaaactaggaagaatgatagttacaacaattatattgcaagagcctccatagtaacagacctaagtaaattcaatcaagcctttagatatgaaaccacagctatctgtgcagatgtagcagatgagttacatggtacgcaaagcttattttgttggttacatcttattgttcccatgaccacaatgatatgtgcatacagacatgcaccaccagaaacaaagggggagtatgacatagacaaaatagaagagcaaagtgggctatacagatatcatatgggagggattgaagggtggtgtcagaagttatggacaatggaagcgatatccttgttagatgtagtatctgttaagactcgttgtcagatgacctctctattaaacggagacaatcaatcaatagatgtcagtaaaccagtaaaattgtctgaaggtatagatgaagtaaaagcagattatagcttagcaattaaaatgcttaaagagataagagatgcctataaaaacattggccataaactcaaagaaggtgaaacatatatatcaagagatctccaatttataagtaaggtgattcaatctgagggggtcatgcatcctacccccataaaaaagatattaagggtaggtccctggataaatacaatactagatgacattaaaaccagtgcagaatcaatagggagtctgtgtcaagaactagagttcagaggagaaagtatgctagttagcttgatattaaggaatttctggctgtataacttatacatgcatgagtcaaaacagcatccgttagctggaaaacaactgtttaagcaattgaacaaaacactaacatctgtgcaaagattttttgagctgaagaaagaaaatgatgtggttgacctatggatgaatataccaatgcagtttggagggggagacccagtagttttttacagatctttttacagaaggactcctgatttcctgactgaagcaatcagccatgtggatttactgttaaaagtttcgaacaatattaaaaatgagactaagatacgattctttaaagccttattatctatagaaaagaatgaacgtgcaacattaacaacactaatgagagacccccaggcggtaggatcggaaagacaagctaaggtaacaagtgatataaatagaacagcagttactagcatactgagtctatctccgaatcagctcttttgtgatagtgctatacactatagcagaaatgaagaagaagtcgggatcattgcagacaacataacacctgtttatcctcacggattgagagtgctctatgaatcactaccttttcataaggctgaaaaggttgtcaatatgatatcaggtacaaagtctataactaacctattgcagagaacatctgctatcaatggtgaagatattgatagagcagtgtctatgatgttagagaacttagggttgttatctaggatattgtcagtaataattaatagtatagaaataccaattaagtccaatggcagattgatatgctgtcaaatttctaagactttgagagaaaaatcatggaacaatatggaaatagtaggagtgacatctccaagtattgtaacatgtatggatgttgtgtatgcaactagttctcatttaaaaggaataattattgaaaaattcagtactgacaagaccacaagaggtcagaggggaccaaaaagcccctgggtaggatcaagcactcaagagaaaaaattagttcctgtttataatagacaaattctttcaaaacaacaaaaggagcaactggaagcaataggaaaaatgaggtgggtgtataaaggaactccagggctaagaagattgctcaataagatttgcataggaagtttaggtattagctataaatgtgtaaaacctctattaccaagattcatgagtgtaaacttcttacataggttatctgttagtagcagacccatggaattcccagcttctgttccagcttataggacaacaaattaccactttgacactagtccaatcaaccaagcattaagtgagaggttcgggaacgaagacattaatctagtgttccaaaatgcaatcagctgcggaattagtataatgagtgttgtagaacagttaactggtagaagcccaaaacaattagtcttaatcccccaattagaagagatagatattatgcctcctcctgtatttcaaggaaaattcaattataaactagttgataaaataacctctgatcaacacatcttcagtcctgacaaaatagacatattaacactagggaagatgcttatgcctactataaaaggtcaaaaaactgatcagttcttaaataagagagaaaactatttccatggaaataatttaattgaatctttatctgcagcacttgcatgccactggtgtggaatattaacagaacagtgtgtagaaaacaatatctttaggaaagactggggtgatgggttcatatcagatcatgccttcatggatttcaagatatttctatgtgtatttaaaaccaaacttttatgtagttggggatcccaagggaaaaatgtaaaagatgaagatataatagatgaatccattgacaaattattaagaattgacaacactttttggagaatgttcagcaaagtcatgtttgaatcaaaggtcaaaaaaagaataatgttatatgatgtaaaattcctatcattagtaggttatataggatttaaaaactggtttatagagcagttaagagtagtagaattgcatgaagtgccctggattgtcaatgctgaaggggagctagttgaaattaaaccaatcaaaatttatttgcagttaatagaacaaagtctatctttaagaataactgttttgaattatacagacatggcacatgctcttacacgattaattaggaagaaattgatgtgtgataatgcactcttcaatccaagttcatcaccaatgtttagtctaactcaagttatcgatcctacaacacagctagactattttcctaaggtgatatttgaaaggttaaaaagttatgataccagttcagactacaacaaagggaagttaacaagaaattacatgacattattaccatggcagcacgtaaacaggtataattttgtctttagttcaacaggatgtaaaatcagcttgaagacatgcatcgggaaattgataaaggacttaaaccctaaggttctttactttattggagaaggagcaggtaactggatggcaagaacagcatgtgagtatcctgacataaaatttgtatataggagtttaaaggatgatcttgatcatcattacccattagaatatcaaagggtaataggtgatttaaatagggtaatagatggtggtgaaggactatcaatggagaccacagatgcaactcaaaagactcattgggacttaatacacagaataagtaaagatgctttattgataacattgtgtgatgcagaattcaaaaacagagatgatttctttaaaatggtaattctttggagaaaacatgtattatcatgtagaatctgtacagcttatggaacagatctttacttatttgcaaagtatcatgcgacggactgcaatataaaattaccattttttgtaaggtctgtagctacttttattatgcaaggaagcaaattgtcaggatcagaatgttacatacttttaacattaggtcatcacaataatctgccatgccatggagaaatacaaaattccaaaatgagaatagcagtgtgtaatgatttccatgcctcaaaaaaactagacaacaaatcaattgaagctaactgtaaatctcttctatcaggattaagaataccaataaacaaaaaagagttaaatagacaaaagaaactgttaacactacaaagcaatcattcttccatagcaacagttggcggcagtaagattatagaatccaaatggttaaagaataaagcaagtacaataattgattggttagagcatatcttgaattctccaaaaggtgaattaaactatgatttctttgaagcattagagaacacataccccaatatgatcaagcttatagataacctgggaaatgcagagataaaaaaactaatcaaagttcctgggtatatgcttgtgagtaagaagtaa

SEQ ID NO: 338 - protein, 187 aa, human metapneumo virus
MSRKAPCKYEVRGKCNRGSECKFNHNYWSWPDRYLLIRSNYLLNQLLRNTDRADGLSIISGAGREDRTQDFVLGSTNVVQGYIDDNQSITKAAACYSLHNIIKQLQEVEVRQARDNKLSDSKHVALHNLVLSYMEMSKTPASLINNLKRLPREKLKKLAKLIIDLSAGAENDSSYALQDSESTNQVQ

SEQ ID NO: 339 - protein, 187 aa, human metapneumo virus
MSRKAPCKYEVRGKCNRGSECKFNHNYWSWPDRYLLIRSNYLLNQLLRNTDRADGLSIISGAGREDRTQDFVLGSTNVVQGYIDDNQSITKAAACYSLHNIIKQLQEVEVRQARDSKLSDSKHVALHNLILSYMEMSKTPASLINNLKRLPREKLKKLAKLIIDLSAGADNDSSYALQDSESTNQVQ

SEQ ID NO: 340 - protein, 187 aa, human metapneumo virus
MSRKAPCKYEVRGKCNRGSDCKFNHNYWSWPDRYLLLRSNYLLNQLLRNTDKADGLSIISGAGREDRTQDFVLGSTNVVQGYIDDNQGITKAAACYSLHNIIKQLQETEVRQARDNKLSDSKHVALHNLILSYMEMSKTPASLINNLKKLPREKLKKLARLIIDLSAGTDNDSSYALQDSESTNQVQ

SEQ ID NO: 341 - protein, 187 aa, human metapneumo virus
MSRKAPCKYEVRGKCNRGSECKFNHNYWSWPDRYLLLRSNYLLNQLLRNTDKADGLSIISGAGREDRTQDFVLGSTNVVQGYIDNNQGITKAAACYSLHNIIKQLQEIEVRQARDNKLSDSKHVALHNLILSYMEMSKTPASLINNLKKLPREKLKKLAKLIIDLSAGTDNDSSYALQDSESTNQVQ

SEQ ID NO: 342 - DNA, 564 bp, human metapneumo virus
atgtctcgcaaggctccgtgcaaatatgaagtgcggggcaaatgcaatagaggaagtgagtgcaagtttaaccacaattactggagttggccagatagatacttattaataagatcaaattatttattaaatcaacttttaaggaacactgatagagctgatggcttatcaataatatcaggagcaggcagagaagataggacacaagattttgtcctaggttccaccaatgtggttcaaggttatattgatgataaccaaagcataacaaaagctgcagcctgttacagtctacataatataatcaaacaactacaagaagttgaagttaggcaggctagagataacaaactatctgacagcaaacatgtagcacttcacaacttagtcctatcttatatggagatgagcaaaactcctgcatctttaatcaacaatctcaagagactgccgagagagaaactgaaaaaattagcaaagctcataattgacttatcagcaggtgctgaaaatgactcttcatatgccttgcaagacagtgaaagcactaatcaagtgcagtga

SEQ ID NO: 343 - DNA, 564 bp, human metapneumo virus
atgtctcgcaaggctccatgcaaatatgaagtgcggggcaaatgcaacagaggaagtgagtgtaagtttaaccacaattactggagttggccagatagatacttattaataagatcaaactatctattaaatcagcttttaaggaacactgatagagctgatggcctatcaataatatcaggcgcaggcagagaagacagaacgcaagattttgttctaggttccaccaatgtggttcaaggttatattgatgataaccaaagcataacaaaagctgcagcctgctacagtctacacaacataatcaagcaactacaagaagttgaagttaggcaggctagagatagcaaactatctgacagcaagcatgtggcactccataacttaatcttatcttacatggagatgagcaaaactcccgcatctttaatcaacaatcttaaaagactgccgagagaaaaactgaaaaaattagcaaagctgataattgacttatcagcaggcgctgacaatgactcttcatatgccctgcaagacagtgaaagcactaatcaagtgcagtga

SEQ ID NO: 344 - DNA, 564 bp, human metapneumo virus
atgtctcgtaaggctccatgcaaatatgaagtgcggggcaaatgcaacagagggagtgattgcaaattcaatcacaattactggagttggcctgatagatatttattgttaagatcaaattatctcttaaatcagcttttaagaaacacagataaggctgatggtttgtcaataatatcaggagcaggtagagaagatagaactcaagactttgttcttggttctactaatgtggttcaagggtacattgatgacaaccaaggaataaccaaggctgcagcttgctatagtctacacaacataatcaagcaactacaagaaacagaagtaagacaggctagagacaacaagctttctgatagcaaacatgtggcgctccacaacttgatattatcctatatggagatgagcaaaactcctgcatctctaatcaacaacctaaagaaactaccaagggaaaaactgaagaaattagcaagattaataattgatttatcagcaggaactgacaatgactcttcatatgccttgcaagacagtgaaagcactaatcaagtgcagtaa

SEQ ID NO: 345 - DNA, 564 bp, human metapneumo virus
atgtctcgcaaagctccatgcaaatatgaagtacggggcaagtgcaacaggggaagtgagtgcaaattcaaccacaattactggagctggcctgataggtatttattgttaagatcaaattatctcttgaatcagcttttaagaaacactgataaggctgatggtttgtcaataatatcaggagcaggtagagaagataggactcaagactttgttcttggttctactaatgtggttcaagggtacattgataacaatcaaggaataacaaaggctgcagcttgctatagtctacataacataataaaacagctacaagaaatagaagtaagacaggctagagataataagctttctgacagcaaacatgtggcacttcacaacttgatattatcctatatggagatgagcaaaactcctgcatccctgattaataacctaaagaaactaccaagagaaaaactgaagaaattagcgaaattaataattgatttatcagcaggaactgataatgactcttcatatgccttgcaagacagtgaaagcactaatcaagtgcagtaa

SEQ ID NO: 346 - protein, 71 aa, human metapneumo virus
MTLHMPCKTVKALIKCSEHGPVFITIEVDDMIWTHKDLKEALSDGIVKSHTNIYNCYLENIEIIYVKAYLS

SEQ ID NO: 347 - protein, 71 aa, human metapneumo virus
MTLHMPCKTVKALIKCSEHGPVFITIEVDEMIWTQKELKEALSDGIVKSHTNIYNCYLENIEIIYVKAYLS

SEQ ID NO: 348 - protein, 71 aa, human metapneumo virus
MTLHMPCKTVKALIKCSKHGPKFITIEADDMIWTHKELKETLSDGIVKSHTNIYSCYLENIEIIYVKTYLS

SEQ ID NO: 349 - protein, 71 aa, human metapneumo virus
MTLHMPCKTVKALIKCSKHGPKFITIEADDMIWTHKELKETLSDGIVKSHTNIYSCYLENIEIIYVKAYLS

SEQ ID NO: 350 - DNA, 216 bp, human metapneumo virus
atgactcttcatatgccttgcaagacagtgaaagcactaatcaagtgcagtgagcatggtccagttttcattactatagaggttgatgacatgatatggactcacaaggacttaaaagaagctttatctgatgggatagtgaagtctcatactaacatttacaattgttatttagaaaacatagaaattatatatgtcaaggcttacttaagttag

SEQ ID NO: 351 - DNA, 216 bp, human metapneumo virus
atgactcttcatatgccctgcaagacagtgaaagcactaatcaagtgcagtgagcatggtcctgttttcattactatagaggttgatgaaatgatatggactcaaaaagaattaaaagaagctttgtccgatgggatagtgaagtctcacaccaacatttacaattgttatttagaaaacatagaaattatatatgtcaaggcttacttaagttag

SEQ ID NO: 352 - DNA, 216 bp, human metapneumo virus
atgactcttcatatgccttgcaagacagtgaaagcactaatcaagtgcagtaaacatggtcccaaattcattaccatagaggcagatgatatgatatggactcacaaagaattaaaagaaacactgtctgatgggatagtaaaatcacacaccaatatttatagttgttacttagaaaatatagaaataatatatgttaaaacttacttaagttag

SEQ ID NO: 353 - DNA, 216 bp, human metapneumo virus
atgactcttcatatgccttgcaagacagtgaaagcactaatcaagtgcagtaagcatggtcccaaattcattaccatagaggcagatgatatgatatggacacacaaagaattaaaggagacactgtctgatgggatagtaaaatcacacaccaatatttacagttgttatttagaaaatatagaaataatatatgttaaagcttacttaagttag

SEQ ID NO: 354 - DNA, 727 bp, human metapneumo virus
atgtctcgcaaggctccgtgcaaatatgaagtgcggggcaaatgcaatagaggaagtgagtgcaagtttaaccacaattactggagttggccagatagatacttattaataagatcaaattatttattaaatcaacttttaaggaacactgatagagctgatggcttatcaataatatcaggagcaggcagagaagataggacacaagattttgtcctaggttccaccaatgtggttcaaggttatattgatgataaccaaagcataacaaaagctgcagcctgttacagtctacataatataatcaaacaactacaagaagttgaagttaggcaggctagagataacaaactatctgacagcaaacatgtagcacttcacaacttagtcctatcttatatggagatgagcaaaactcctgcatctttaatcaacaatctcaagagactgccgagagagaaactgaaaaaattagcaaagctcataattgacttatcagcaggtgctgaaaatgactcttcatatgccttgcaagacagtgaaagcactaatcaagtgcagtgagcatggtccagttttcattactatagaggttgatgacatgatatggactcacaaggacttaaaagaagctttatctgatgggatagtgaagtctcatactaacatttacaattgttatttagaaaacatagaaattatatatgtcaaggcttacttaagttag

SEQ ID NO: 355 - DNA, 727 bp, human metapneumo virus
atgtctcgcaaggctccatgcaaatatgaagtgcggggcaaatgcaacagaggaagtgagtgtaagtttaaccacaattactggagttggccagatagatacttattaataagatcaaactatctattaaatcagcttttaaggaacactgatagagctgatggcctatcaataatatcaggcgcaggcagagaagacagaacgcaagattttgttctaggttccaccaatgtggttcaaggttatattgatgataaccaaagcataacaaaagctgcagcctgctacagtctacacaacataatcaagcaactacaagaagttgaagttaggcaggctagagatagcaaactatctgacagcaagcatgtggcactccataacttaatcttatcttacatggagatgagcaaaactcccgcatctttaatcaacaatcttaaaagactgccgagagaaaaactgaaaaaattagcaaagctgataattgacttatcagcaggcgctgacaatgactcttcatatgccctgcaagacagtgaaagcactaatcaagtgcagtgagcatggtcctgttttcattactatagaggttgatgaaatgatatggactcaaaaagaattaaaagaagctttgtccgatgggatagtgaagtctcacaccaacatttacaattgttatttagaaaacatagaaattatatatgtcaaggcttacttaagttag

SEQ ID NO: 356 - DNA, 727 bp, human metapneumo virus
atgtctcgtaaggctccatgcaaatatgaagtgcggggcaaatgcaacagagggagtgattgcaaattcaatcacaattactggagttggcctgatagatatttattgttaagatcaaattatctcttaaatcagcttttaagaaacacagataaggctgatggtttgtcaataatatcaggagcaggtagagaagatagaactcaagactttgttcttggttctactaatgtggttcaagggtacattgatgacaaccaaggaataaccaaggctgcagcttgctatagtctacacaacataatcaagcaactacaagaaacagaagtaagacaggctagagacaacaagctttctgatagcaaacatgtggcgctccacaacttgatattatcctatatggagatgagcaaaactcctgcatctctaatcaacaacctaaagaaactaccaagggaaaaactgaagaaattagcaagattaataattgatttatcagcaggaactgacaatgactcttcatatgccttgcaagacagtgaaagcactaatcaagtgcagtaaacatggtcccaaattcattaccatagaggcagatgatatgatatggactcacaaagaattaaaagaaacactgtctgatgggatagtaaaatcacacaccaatatttatagttgttacttagaaaatatagaaataatatatgttaaaacttacttaagttag

SEQ ID NO: 357 - DNA, 727 bp, human metapneumo virus
atgtctcgcaaagctccatgcaaatatgaagtacggggcaagtgcaacaggggaagtgagtgcaaattcaaccacaattactggagctggcctgataggtatttattgttaagatcaaattatctcttgaatcagcttttaagaaacactgataaggctgatggtttgtcaataatatcaggagcaggtagagaagataggactcaagactttgttcttggttctactaatgtggttcaagggtacattgataacaatcaaggaataacaaaggctgcagcttgctatagtctacataacataataaaacagctacaagaaatagaagtaagacaggctagagataataagctttctgacagcaaacatgtggcacttcacaacttgatattatcctatatggagatgagcaaaactcctgcatccctgattaataacctaaagaaactaccaagagaaaaactgaagaaattagcgaaattaataattgatttatcagcaggaactgataatgactcttcatatgccttgcaagacagtgaaagcactaatcaagtgcagtaagcatggtcccaaattcattaccatagaggcagatgatatgatatggacacacaaagaattaaaggagacactgtctgatgggatagtaaaatcacacaccaatatttacagttgttatttagaaaatatagaaataatatatgttaaagcttacttaagttag

SEQ ID NO: 358 - protein, 254 aa, human metapneumo virus
MESYLVDTYQGIPYTAAVQVDLIEKDLLPASLTIWFPLFQANTPPAVLLDQLKTLTITTLYAASQNGPILKVNASAQGAAMSVLPKKFEVNATVALDEYSKLEFDKLTVCEVKTVYLTTMKPYGMVSKFVSSAKSVGKKTHDLIALCDFMDLEKNTPVTIPAFIKSVSIKESESATVEAAISSEADQALTQAKIAPYAGLIMIMTMNNPKGIFKKLGAGTQVIVELGAYVQAESISKICKTWSHQGTRYVLKSR

SEQ ID NO: 359 - protein, 254 aa, human metapneumo virus
MESYLVDTYQGIPYTAAVQVDLVEKDLLPASLTIWFPLFQANTPPAVLLDQLKTLTITTLYAASQSGPILKVNASAQGAAMSVLPKKFEVNATVALDEYSKLEFDKLTVCEVKTVYLTTMKPYGMVSKFVSSAKSVGKKTHDLIALCDFMDLEKNTPVTIPAFIKSVSIKESESATVEAAISSEADQALTQAKIAPYAGLIMIMTMNNPKGIFKKLGAGTQVIVELGAYVQAESISKICKTWSHQGTRYVLKSS

SEQ ID NO: 360 - protein, 254 aa, human metapneumo virus
MESYLVDTYQGIPYTAAVQVDLVEKDLLPASLTIWFPLFQANTPPAVLLDQLKTLTITTLYAASQNGPILKVNASAQGAAMSVLPKKFEVNATVALDEYSKLDFDKLTVCDVKTVYLTTMKPYGMVSKFVSSAKSVGKKTHDLIALCDFMDLEKNIPVTIPAFIKSVSIKESESATVEAAISSEADQALTQAKIAPYAGLIMIMTMNNPKGIFKKLGAGTQVIVELGAYVQAESISRICKSWSHQGTRYVLKSR

SEQ ID NO: 361 - protein, 254 aa, human metapneumo virus; identical to SEQ ID NO: 360

SEQ ID NO: 362 - DNA, 765 bp, human metapneumo virus
atggagtcctacctagtagacacctatcaaggcattccttacacagcagctgttcaagttgatctaatagaaaaggacctgttacctgcaagcctaacaatatggttccctttgtttcaggccaacacaccaccagcagtgctgctcgatcagctaaaaaccctgacaataaccactctgtatgctgcatcacaaaatggtccaatactcaaagtgaatgcatcagcccaaggtgcagcaatgtctgtacttcccaaaaaatttgaagtcaatgcgactgtagcactcgatgaatatagcaaactggaatttgacaaactcacagtctgtgaagtaaaaacagtttacttaacaaccatgaaaccatacgggatggtatcaaaatttgtgagctcagccaaatcagttggcaaaaaaacacatgatctaatcgcactatgtgattttatggatctagaaaagaacacacctgttacaataccagcattcatcaaatcagtttcaatcaaagagagtgagtcagctactgttgaagctgctataagcagtgaagcagaccaagctctaacacaggccaaaattgcaccttatgcgggattaattatgatcatgactatgaacaatcccaaaggcatattcaaaaagcttggagctgggactcaagtcatagtagaactaggagcatatgtccaggctgaaagcataagcaaaatatgcaagacttggagccatcaagggacaagatatgtcttgaagtccagataa

SEQ ID NO: 363 - DNA, 765 bp, human metapneumo virus
atggagtcctatctggtagacacttatcaaggcatcccttacacagcagctgttcaagttgatctagtagaaaaggacctgttacctgcaagcctaacaatatggttccccttgtttcaggccaatacaccaccagcagttctgcttgatcagctaaagactctgactataactactctgtatgctgcatcacaaagtggtccaatactaaaagtgaatgcatcagcccagggtgcagcaatgtctgtacttcccaaaaagtttgaagtcaatgcgactgtagcacttgacgaatatagcaaattagaatttgacaaacttacagtctgtgaagtaaaaacagtttacttaacaaccatgaaaccatatgggatggtatcaaagtttgtgagctcggccaaatcagttggcaaaaaaacacatgatctaatcgcattatgtgattttatggatctagaaaagaacacaccagttacaataccagcatttatcaaatcagtttctatcaaggagagtgaatcagccactgttgaagctgcaataagcagtgaagcagaccaagctctaacacaagccaaaattgcaccttatgcgggactgatcatgattatgaccatgaacaatcccaaaggcatattcaagaagcttggagctgggacccaagttatagtagaactaggagcatatgtccaggctgaaagcataagtaaaatatgcaagacttggagccatcaaggaacaagatatgtgctgaagtccagttaa

SEQ ID NO: 364 - DNA, 765 bp, human metapneumo virus
atggagtcctatctagtagacacttatcaaggcattccatatacagctgctgttcaagttgacctggtagaaaaagatttactgccagcaagtttgacaatatggtttcctttatttcaggccaacacaccaccagcagttctgcttgatcagctaaaaaccttgacaataacaactctgtatgctgcatcacagaatggtccaatactcaaggtaaatgcatctgcccaaggtgctgccatgtctgtacttcccaaaaaattcgaggtaaatgcaactgtagcacttgatgaatacagtaaacttgattttgacaagctgacggtctgcgatgttaaaacagtttatttgacaactatgaaaccgtacgggatggtgtcaaaatttgtgagttcagccaaatcagttggcaaaaagacacatgatctaattgcactatgtgacttcatggacctagagaaaaatatacctgtgacaataccagcattcataaagtcagtttcaatcaaagagagtgaatcagccactgttgaagctgcaataagcagcgaagccgaccaagccttgacacaagccaagattgcgccctatgcaggactaattatgatcatgaccatgaacaatccaaaaggtatattcaagaaactaggggctggaacacaagtgatagtagagctgggggcatatgttcaggctgagagcatcagtaggatctgcaagagctggagtcaccaaggaacaagatacgtactaaaatccagataa

SEQ ID NO: 365 - DNA, 765 bp, human metapneumo virus
atggagtcctatctagtggacacttatcaaggcattccctacacagctgctgttcaagttgatctggtagaaaaagacttactaccagcaagtttgacaatatggtttcctctattccaagccaacacaccaccagcggttttgctcgatcagctaaaaaccttgactataacaactctgtatgctgcatcacagaatggtccaatactcaaagtaaatgcatcagctcagggtgctgctatgtctgtacttcccaaaaaattcgaagtaaatgcaactgtggcacttgatgaatacagcaaacttgactttgacaagttaacggtttgcgatgttaaaacagtttatttgacaaccatgaagccatatgggatggtgtcaaaatttgtgagttcagccaaatcagttggcaaaaagacacatgatctaattgcactgtgtgacttcatggacctagagaaaaatatacctgtgacaataccagcattcataaagtcagtttcaatcaaagagagtgagtcagccactgttgaagctgcaataagcagtgaggccgaccaagcattaacacaagccaaaattgcaccctatgcaggactaatcatgatcatgaccatgaacaatccaaaaggtatattcaagaaactaggagctggaacacaagtgatagtagagctaggggcatatgttcaagccgagagcatcagcaggatctgcaagagctggagtcaccaaggaacaagatatgtactaaaatccagataa

SEQ ID NO: 366 - protein, 394 aa, human metapneumo virus
MSLQGIHLSDLSYKHAILKESQYTIKRDVGTTTAVTPSSLQQEITLLCGEILYAKHADYKYAAEIGIQYISTALGSERVQQILRNSGSEVQVVLTRTYSLGKIKNNKGEDLQMLDIHGVEKSWVEEIDKEARKTMATLLKESSGNIPQNQRPSAPDTPIILLCVGALIFTKLASTIEVGLETTVRRANRVLSDALKRYPRMDIPKIARSFYDLFEQKVYHRSLFIEYGKALGSSSTGSKAESLFVNIFMQAYGAGQTMLRWGVIARSSNNIMLGHVSVQAELKQVTEVYDLVREMGPESGLLHLRQSPKAGLLSLANCPNFASVVLGNASGLGIIGMYRGRVPNTELFSAAESYAKSLKESNKINFSSLGLTDEEKEAAEHFLNVSDDSQNDYE

SEQ ID NO: 367 - protein, 394 aa, human metapneumo virus
MSLQGIHLSDLSYKHAILKESQYTIKRDVGTTTAVTPSSLQQEITLLCGEILYAKHADYKYAAEIGIQYISTALGSERVQQILRNSGSEVQVVLTRTYSLGKVKNNKGEDLQMLDIHGVEKSWVEEIDKEARKTMATLLKESSGNIPQNQRPSAPDTPIILLCVGALIFTKLASTIEVGLETTVRRANRVLSDALKRYPRMDIPKIARSFYDLFEQKVYYRSLFIEYGKALGSSSTGSKAESLFVNIFMQAYGAGQTMLRWGVIARSSNNIMLGHVSVQAELKQVTEVYDLVREMGPESGLLHLRQSPKAGLLSLANCPNFASVVLGNASGLGIIGMYRGRVPNTELFSAAESYAKSLKESNKINFSSLGLTDEEKEAAEHFLNVSDDSQNDYE

SEQ ID NO: 368 - protein, 394 aa, human metapneumo virus
MSLQGIHLSDLSYKHAILKESQYTIKRDVGTTTAVTPSSLQQEITLLCGEILYTKHTDYKYAAEIGIQYICTALGSERVQQILRNSGSEVQVVLTKTYSLGKGKNSKGEELQMLDIHGVEKSWIEEIDKEARKTMVTLLKESSGNIPQNQRPSAPDTPIILLCVGALIFTKLASTIEVGLETTVRRANRVLSDALKRYPRIDIPKIARSFYELFEQKVYYRSLFIEYGKALGSSSTGSKAESLFVNIFMQAYGAGQTLLRWGVIARSSNNIMLGHVSVQSELKQVTEVYDLVREMGPESGLLHLRQSPKAGLLSLANCPNFASVVLGNASGLGIIGMYRGRVPNTELFSAAESYARSLKESNKINFSSLGLTDEEKEAAEHFLNMSGDNQNDYE

SEQ ID NO: 369 - protein, 394 aa, human metapneumo virus
MSLQGIHLSDLSYKHAILKESQYTIKRDVGTTTAVTPSSLQQEITLLCGEILYTKHTDYKYAAEIGIQYICTALGSERVQQILRNSGSEVQVVLTKTYSLGKGKNSKGEELQMLDIHGVEKSWVEEIDKEARKTMVTLLKESSGNIPQNQRPSAPDTPIILLCVGALIFTKLASTIEVGLETTVRRANRVLSDALKRYPRVDIPKIARSFYELFEQKVYYRSLFIEYGKALGSSSTGSKAESLFVNIFMQAYGAGQTMLRWGVIARSSNNIMLGHVSVQAELKQVTEVYDLVREMGPESGLLHLRQSPKAGLLSLANCPNFASVVLGNASGLGIIGMYRGRVPNTELFSAAESYARSLKESNKINFSSLGLTDEEKEAAEHFLNMSDDNQDDYE

SEQ ID NO: 370 - DNA, 1185 bp, human metapneumo virus
atgtctcttcaagggattcacctgagtgatttatcatacaagcatgctatattaaaagagtctcagtacacaataaaaagagatgtgggtacaacaactgcagtgacaccctcatcattgcaacaagaaataacactgttgtgtggagaaattctgtatgctaaacatgctgactacaaatatgctgcagaaataggaatacaatatattagcacagctttaggatcagagagagtgcagcagattctgaggaactcaggcagtgaagtccaagtggtcttaaccagaacgtactctctggggaaaattaaaaacaataaaggagaagatttacagatgttagacatacacggggtagagaagagctgggtagaagagatagacaaagaagcaaggaaaacaatggcaaccttgcttaaggaatcatcaggtaatatcccacaaaatcagaggccctcagcaccagacacacccataatcttattatgtgtaggtgccttaatattcactaaactagcatcaaccatagaagtgggactagagaccacagtcagaagggctaaccgtgtactaagtgatgcactcaagagataccctagaatggacataccaaagattgccagatccttctatgacttatttgaacaaaaagtgtatcacagaagtttgttcattgagtatggcaaagcattaggctcatcatctacaggcagcaaagcagaaagtctatttgttaatatattcatgcaagcttatggggccggtcaaacaatgctaaggtggggggtcattgccaggtcatccaacaatataatgttaggacatgtatccgtccaagctgagttaaaacaggtcacagaagtctatgacttggtgcgagaaatgggccctgaatctggacttctacatttaaggcaaagcccaaaagctggactgttatcactagccaactgtcccaactttgcaagtgttgttctcggaaatgcctcaggcttaggcataatcggtatgtatcgagggagagtaccaaacacagaattattttcagcagctgaaagttatgccaaaagtttgaaagaaagcaataaaataaatttctcttcattaggacttacagatgaagagaaagaggctgcagaacatttcttaaatgtgagtgacgacagtcaaaatgattatgagtaa

SEQ ID NO: 371 - DNA, 1185 bp, human metapneumo virus
atgtctcttcaagggattcacctgagtgatctatcatacaagcatgctatattaaaagagtctcagtatacaataaagagagatgtaggcacaacaaccgcagtgacaccctcatcattgcaacaagaaataacactattgtgtggagaaattctatatgctaagcatgctgattacaaatatgctgcagaaataggaatacaatatattagcacagctctaggatcagagagagtacagcagattctaagaaactcaggtagtgaagtccaagtggttttaaccagaacgtactccttggggaaagttaaaaacaacaaaggagaagatttacagatgttagacatacacggagtagagaaaagctgggtggaagagatagacaaagaagcaagaaaaacaatggcaactttgcttaaagaatcatcaggcaatattccacaaaatcagaggccttcagcaccagacacacccataatcttattatgtgtaggtgccttaatatttaccaaactagcatcaactatagaagtgggattagagaccacagtcagaagagctaaccgtgtactaagtgatgcactcaaaagataccctaggatggacataccaaaaatcgctagatctttctatgacttatttgaacaaaaagtgtattacagaagtttgttcattgagtatggcaaagcattaggctcatcctctacaggcagcaaagcagaaagtttattcgttaatatattcatgcaagcttacggtgctggtcaaacaatgctgaggtggggagtcattgccaggtcatctaacaatataatgttaggacatgtatctgttcaagctgagttaaaacaagtcacagaagtctatgacctggtgcgagaaatgggccctgaatctgggctcctacatttaaggcaaagcccaaaagctggactgttatcactagccaattgtcccaactttgctagtgttgttctcggcaatgcctcaggcttaggcataataggtatgtatcgcgggagagtgccaaacacagaactattttcagcagcagaaagctatgccaagagtttgaaagaaagcaataaaattaacttttcttcattaggactcacagatgaagaaaaagaggctgcagaacacttcctaaatgtgagtgacgacagtcaaaatgattatgagtaa

SEQ ID NO: 372 - DNA, 1185 bp, human metapneumo virus
atgtctcttcaagggattcacctaagtgatctatcatataaacatgctatattaaaagagtctcaatacacaataaaaagagatgtaggcaccacaactgcagtgacaccttcatcattacaacaagaaataacacttttgtgtggggaaatactttacactaaacacactgattacaaatatgctgctgagataggaatacaatatatttgcacagctctaggatcagaaagagtacaacagattttgagaaactcaggtagtgaagttcaggtggttctaaccaaaacatactccttagggaaaggcaaaaacagtaaaggggaagagctgcagatgttagatatacatggagtggaaaagagttggatagaagaaatagacaaagaggcaagaaagacaatggtaactttgcttaaggaatcatcaggtaacatcccacaaaaccagagaccttcagcaccagacacaccaataattttattatgtgtaggtgccctaatattcactaaactagcatcaacaatagaagttggattagagactacagttagaagagctaatagagtgctaagtgatgcactcaaaagatacccaaggatagatataccaaagattgctagatctttttatgaactatttgaacaaaaagtgtactacagaagtttattcattgagtacggaaaagctttaggctcatcttcaacaggaagcaaagcagaaagtttgtttgtaaatatatttatgcaagcttatggagctggccaaacactgctaaggtggggtgtcattgccagatcatccaacaacataatgctagggcatgtatctgtgcaatctgaattgaagcaagttacagaggtttatgacttggtgagagaaatgggtcctgaatctgggcttttacatctaagacaaagtccaaaggcagggctgttatcattggccaattgccccaattttgctagtgttgttcttggcaatgcttcaggtctaggcataatcggaatgtacagagggagagtaccaaacacagagctattttctgcagcagaaagttatgccagaagcttaaaagaaagcaataaaatcaacttctcttcgttagggcttacagatgaagaaaaagaagctgcagaacacttcttaaacatgagtggtgacaatcaaaatgattatgagtaa

SEQ ID NO: 373 - DNA, 1185 bp, human metapneumo virus
atgtctcttcaagggattcacctaagtgatctgtcatataaacatgctatattaaaagagtctcaatacacaataaaaagagatgtaggcaccacaactgcagtgacaccttcatcattgcagcaagagataacacttttgtgtggagagattctttacactaaacatactgattacaaatatgctgcagagatagggatacaatatatttgcacagctctaggatcagaaagagtacaacagattttaagaaattcaggtagtgaggttcaggtggttctaaccaagacatactctttagggaaaggtaaaaatagtaaaggggaagagttgcaaatgttagatatacatggagtggaaaagagttgggtagaagaaatagacaaagaggcaagaaaaacaatggtgactttgctaaaggaatcatcaggcaacatcccacaaaaccagaggccttcagcaccagacacaccaataattttattgtgtgtaggtgctttaatattcactaaactagcatcaacaatagaagttggactagagactacagttagaagggctaacagagtgttaagtgatgcgctcaaaagataccctagggtagatataccaaagattgctagatctttttatgaactatttgagcagaaagtgtattacaggagtctattcattgagtatgggaaagctttaggctcatcttcaacaggaagcaaagcagaaagtttgtttgtaaatatatttatgcaagcttatggagccggtcagacaatgctaaggtggggtgtcattgccagatcatctaacaacataatgctagggcatgtatctgtgcaagctgaattgaaacaagttacagaggtttatgatttggtaagagaaatgggtcctgaatctgggcttttacatctaagacaaagtccaaaggcaggactgttatcgttggctaattgccccaattttgctagtgttgttcttggtaatgcttcaggtctaggtataatcggaatgtacaggggaagagtgccaaacacagagctattttctgcagcagaaagttatgccagaagcttaaaagaaagcaacaaaatcaacttctcctcattagggctcacagacgaagaaaaagaagctgcagaacacttcttaaacatgagtgatgacaatcaagatgattatgagtaa

SEQ ID NO: 374 - protein, 294 aa, human metapneumo virus
MSFPEGKDILFMGNEAAKLAEAFQKSLRKPGHKRSQSIIGEKVNTVSETLELPTISRPAKPTIPSEPKLAWTDKGGATKTEIKQAIKVMDPIEEEESTEKKVLPSSDGKTPAEKKLKPSTNTKKKVSFTPNEPGKYTKLEKDALDLLSDNEEEDAESSILTFEERDTSSLSIEARLESIEEKLSMILGLLRTLNIATAGPTAARDGIRDAMIGVREELIADIIKEAKGKAAEMMEEEMSQRSKIGNGSVKLTEKAKELNKIVEDESTSGESEEEEEPKDTQDNSQEDDIYQLIM

SEQ ID NO: 375 - protein, 294 aa, human metapneumo virus
MSFPEGKDILFMGNEAAKLAEAFQKSLRKPNHKRSQSIIGEKVNTVSETLELPTISRPTKPTILSEPKLAWTDKGGAIKTEAKQTIKVMDPIEEEEFTEKRVLPSSDGKTPAEKKLKPSTNTKKKVSFTPNEPGKYTKLEKDALDLLSDNEEEDAESSILTFEERDTSSLSIEARLESIEEKLSMILGLLRTLNIATAGPTAARDGIRDAMIGIREELIADIIKEAKGKAAEMMEEEMNQRTKIGNGSVKLTEKAKELNKIVEDESTSGESEEEEEPKDTQENNQEDDIYQLIM

SEQ ID NO: 376 - protein, 294 aa, human metapneumo virus
MSFPEGKDILFMGNEAAKIAEAFQKSLKKSGHKRTQSIVGEKVNTISETLELPTISKPARSSTLLEPKLAWADNSGITKITEKPATKTTDPVEEEEFNEKKVLPSSDGKTPAEKKSKFSTSVKKKVSFTSNEPGKYTKLEKDALDLLSDNEEEDAESSILTFEEKDTSSLSIEARLESIEEKLSMILGLLRTLNIATAGPTAARDGIRDAMIGIREELIAEIIKEAKGKAAEMMEEEMNQRSKIGNGSVKLTEKAKELNKIVEDESTSGESEEEEEPKETQDNNQGEDIYQLIM

SEQ ID NO: 377 - protein, 294 aa, human metapneumo virus
MSFPEGKDILFMGNEAAKIAEAFQKSLKRSGHKRTQSIVGEKVNTISETLELPTISKPARSSTLLEPKLAWADSSGATKTTEKQTTKTTDPVEEEELNEKKVSPSSDGKTPAEKKSKSPTNVKKKVSFTSNEPGKYTKLEKDALDLLSDNEEEDAESSILTFEERDTSSLSIEARLESIEEKLSMILGLLRTLNIATAGPTAARDGIRDAMIGIREELIAEIIKEAKGKAAEMMEEEMNQRSKIGNGSVKLTEKAKELNKIVEDESTSGESEEEEEPKETQDNNQGEDIYQLIM

SEQ ID NO: 378 - DNA, 885 bp, human metapneumo virus
atgtcattccctgaaggaaaagatattcttttcatgggtaatgaagcagcaaaattagcagaagctttccagaaatcattaagaaaaccaggtcataaaagatctcaatctattataggagaaaaagtgaatactgtatcagaaacattggaattacctactatcagtagacctgcaaaaccaaccataccgtcagaaccaaagttagcatggacagataaaggtggggcaaccaaaactgaaataaagcaagcaatcaaagtcatggatcccattgaagaagaagagtctaccgagaagaaggtgctaccctccagtgatgggaaaacccctgcagaaaagaaactgaaaccatcaactaacaccaaaaagaaggtttcatttacaccaaatgaaccagggaaatatacaaagttggaaaaagatgctctagatttgctctcagataatgaagaagaagatgcagaatcttcaatcttaacctttgaagaaagagatacttcatcattaagcattgaggccagattggaatcaatagaggagaaattaagcatgatattagggctattaagaacactcaacattgctacagcaggacccacagcagcaagagatgggatcagagatgcaatgattggcgtaagagaggaattaatagcagacataataaaggaagctaaagggaaagcagcagaaatgatggaagaggaaatgagtcaacgatcaaaaataggaaatggtagtgtaaaattaacagaaaaagcaaaagagctcaacaaaattgttgaagatgaaagcacaagtggagaatccgaagaagaagaagaaccaaaagacacacaagacaatagtcaagaagatgacatttaccagttaattatgtag

SEQ ID NO: 379 - DNA, 885 bp, human metapneumo virus
atgtcattccctgaaggaaaagatattcttttcatgggtaatgaagcagcaaaattggcagaagcttttcaaaaatcattaagaaaacctaatcataaaagatctcaatctattataggagaaaaagtgaacactgtatctgaaacattggaattacctactatcagtagacctaccaaaccgaccatattgtcagagccgaagttagcatggacagacaaaggtggggcaatcaaaactgaagcaaagcaaacaatcaaagttatggatcctattgaagaagaagagtttactgagaaaagggtgctgccctccagtgatgggaaaactcctgcagaaaagaagttgaaaccatcaaccaacactaaaaagaaggtctcatttacaccaaatgaaccaggaaaatacacaaagttggagaaagatgctctagacttgctttcagacaatgaagaagaagatgcagaatcctcaatcttaaccttcgaagaaagagatacttcatcattaagcattgaagccagactagaatcgattgaggagaaattaagcatgatattagggctattaagaacactcaacattgctacagcaggacccacagcagcaagagatgggatcagagatgcaatgattggcataagggaggaactaatagcagacataataaaagaagccaagggaaaagcagcagaaatgatggaagaagaaatgaaccagcggacaaaaataggaaacggtagtgtaaaattaactgaaaaggcaaaggagctcaacaaaattgttgaagacgaaagcacaagtggtgaatccgaagaagaagaagaaccaaaagacacacaggaaaataatcaagaagatgacatttaccagttaattatgtag

SEQ ID NO: 380 - DNA, 885 bp, human metapneumo virus
atgtcattccctgaaggaaaggatattctgttcatgggtaatgaagcagcaaaaatagccgaagctttccagaaatcactgaaaaaatcaggtcacaagagaactcaatctattgtaggggaaaaagttaacactatatcagaaactctagaactacctaccatcagcaaacctgcacgatcatctacactgctggaaccaaaattggcatgggcagacaacagcggaatcaccaaaatcacagaaaaaccagcaaccaaaacaacagatcctgttgaagaagaggaattcaatgaaaagaaagtgttaccttccagtgatgggaagactcctgcagagaaaaaatcaaagttttcaaccagtgtaaaaaagaaagtttcctttacatcaaatgaaccagggaaatacaccaaactagagaaagatgccctagatttgctctcagacaatgaggaagaagacgcagaatcctcaatcctaacttttgaggagaaagatacatcatcactaagcattgaagctagactagaatctatagaagagaagttgagcatgatattaggactgcttcgtacacttaacattgcaacagcaggaccaacagctgcacgagatggaattagggatgcaatgattggtataagagaagagctaatagcagagataattaaggaagccaagggaaaagcagctgaaatgatggaagaagagatgaatcaaagatcaaaaataggaaatggcagtgtaaaactaaccgagaaggcaaaagagctcaacaaaattgttgaagacgagagcacaagcggtgaatcagaagaagaagaagaaccaaaagaaactcaggataacaatcaaggagaagatatttatcagttaatcatgtag

SEQ ID NO: 381 - DNA, 885 bp, human metapneumo virus
atgtcattccctgaaggaaaagatatcctgttcatgggtaatgaagcagcaaaaatagcagaagctttccagaaatcactaaaaagatcaggtcacaaaagaacccagtctattgtaggggaaaaagtaaacactatatcagaaactctagagctacctaccatcagcaaacctgcacgatcatctacactgctagagccaaaattggcatgggcagacagcagcggagccaccaaaaccacagaaaaacaaacaaccaaaacaacagatcctgttgaagaagaggaactcaatgaaaagaaggtatcaccttccagtgatgggaagactcctgcagagaaaaaatcaaaatctccaaccaatgtaaaaaagaaagtttccttcacatcaaatgaaccagggaaatatactaaactagaaaaagatgccctagatttgctctcagacaatgaggaagaagacgcagagtcctcaatcctaacctttgaagagagagacacatcatcactaagcattgaggctagactagaatcaatagaagagaagctaagcatgatattaggactgcttcgtacacttaacattgcaacagcaggaccaacggctgcaagggatggaatcagagatgcaatgattggtataagagaagaactaatagcagaaataataaaagaagcaaagggaaaagcagccgaaatgatggaagaggaaatgaatcaaaggtcaaaaataggtaatggcagtgtaaaactaaccgagaaggcaaaagaacttaataaaattgttgaagacgagagcacaagtggtgaatcagaagaagaagaagaaccaaaagaaactcaggataacaatcaaggagaagatatctaccagttaatcatgtag

SEQ ID NO: 382 - protein, 183 aa, human metapneumo virus
MITLDVIKSDGSSKTCTHLKKIIKDHSGKVLIVLKLILALLTFLTVTITINYIKVENNLQICQSKTESDKKDSSSNTTSVTTKTTLNHDITQYFKSLIQRYTNSAINSDTCWKINRNQCTNITTYKFLCFKSEDTKTNNCDKLTDLCRNKPKPAVGVYHIVECHCIYTVKWKCYHYPTDETQS

SEQ ID NO: 383 - protein, 179 aa, human metapneumo virus
MITLDVIKSDGSSKTCTHLKKIIKDHSGKVLIALKLILALLTFFTITITINYIKVENNLQICQSKTESDKEDSPSNTTSVTTKTTLDHDITQYFKRLIQRYTDSVINKDTCWKISRNQCTNITTYKFLCFKPEDSKINSCDRLTDLCRNKSKSAAEAYHTVECHCIYTIEWKCYHHPID

SEQ ID NO: 384 - protein, 177 aa, human metapneumo virus
MKTLDVIKSDGSSETCNQLKKIIKKHSGKVLIALKLILALLTFFTATITVNYIKVENNLQACQPKNESDKKVTKPNTTSTTIRPTPDPTVVHHLKRLIQRHTNSVTKDSDTCWRIHKNQRTNIKIYKFLCSGFTNSKGTDCEEPTALCDKKLKTIVEKHRKAECHCLHTTEWGCLHP

SEQ ID NO: 385 - protein, 177 aa, human metapneumo virus
MKTLDVIKSDGSSETCNQLKKIIKKHSGKLLIALKLILALLTFFTVTITVNYIKVENNLQACQLKNESDKKDTKLNTTSTTIRPIPDLNAVQYLKRLIQKHTNFVIKDRDTCWRIHTNQCTNIKIYKFLCFGFMNSTNTDCEELTVLCDKKSKTMTEKHRKAECHCLHTTEWWCYYL

SEQ ID NO: 386 - DNA, 552 bp, human metapneumo virus
atgataacattagatgtcattaaaagtgatgggtcttcaaaaacatgtactcacctcaaaaaaataattaaagaccactctggtaaagtgcttattgtacttaagttaatattagctttactaacatttctcacagtaacaatcaccatcaattatataaaagtggaaaacaatctgcaaatatgccagtcaaaaactgaatcagacaaaaaggactcatcatcaaataccacatcagtcacaaccaagactactctaaatcatgatatcacacagtattttaaaagtttgattcaaaggtatacaaactctgcaataaacagtgacacatgctggaaaataaacagaaatcaatgcacaaatataacaacatacaaatttttatgttttaaatctgaagacacaaaaaccaacaattgtgataaactgacagatttatgcagaaacaaaccaaaaccagcagttggagtgtatcacatagtagaatgccattgtatatacacagttaaatggaagtgctatcattacccaaccgatgaaacccaatcctaa

SEQ ID NO: 387 - DNA, 540 bp, human metapneumo virus
atgataacattagatgtcattaaaagtgatgggtcttcaaaaacatgtactcacctcaaaaaaataatcaaagaccattctggtaaagtgcttattgcacttaagttaatattagctttactaacatttttcacaataacaatcactataaattacataaaagtagaaaacaatctacaaatatgccagtcaaaaactgaatcagacaaagaagactcaccatcaaataccacatccgtcacaaccaagactactctagaccatgatataacacagtattttaaaagattaattcaaaggtatacagattctgtgataaacaaggacacatgctggaaaataagcagaaatcaatgcacaaatataacaacatataaatttttatgctttaaacctgaggactcaaaaatcaacagttgtgatagactgacagatctatgcagaaacaaatcaaaatcagcagctgaagcatatcatacagtagaatgccattgcatatacacaattgagtggaagtgctatcaccacccaatagattaa

SEQ ID NO: 388 - DNA, 534 bp, human metapneumo virus
atgaaaacattagatgtcataaaaagtgatggatcctcagaaacgtgtaatcaactcaaaaaaataataaaaaaacactcaggtaaagtgcttattgcactaaaactgatattggccttactgacatttttcacagcaacaatcactgtcaactatataaaagtagaaaacaatttgcaggcatgtcaaccaaaaaatgaatcagacaaaaaggtcacaaagccaaataccacatcaacaacaatcagacccacacccgatccaactgtagtacatcatttgaaaaggctgattcagagacacaccaactctgtcacaaaagacagcgatacttgttggagaatacacaagaatcaacgtacaaatataaaaatatacaagttcttatgctctgggttcacaaattcaaaaggtacagattgtgaggaaccaacagccctatgcgacaaaaagttaaaaaccatagtagaaaaacatagaaaagcagaatgtcactgtctacatacaaccgagtgggggtgccttcatccctaa

SEQ ID NO: 389 - DNA, 534 bp, human metapneumo virus
atgaaaacattagatgtcataaaaagtgatggatcctcagaaacatgtaatcaactcaaaaaaataataaaaaaacactcaggtaaattgcttattgcattaaaactgatattggccttattgacgtttttcacagtaacaattactgttaactatataaaagtagaaaacaatttgcaggcatgtcaattaaaaaatgaatcagacaaaaaggacacaaagctaaataccacatcaacaacaatcagacccattcctgatctaaatgcagtacagtacttgaaaaggctgattcagaaacacaccaactttgtcataaaagacagagatacctgttggagaatacacacgaatcaatgcacaaatataaaaatatataagttcttatgtttcgggtttatgaattcaacaaatacagactgtgaagaactaacagttttatgtgataaaaagtcaaaaaccatgacagaaaaacataggaaagcagagtgtcactgtctacatacaaccgagtggtggtgttattatctttaa

SEQ ID NO: 390 - protein, 298 aa, Human respiratory syncytial virus
  attachment glycoprotein of Human respiratory syncytial virus
MSKTKDQRTAKTLERTWDTLNHLLFISSCLYKLNLKSIAQITLSILAMIISTSLIIAAIIFIASANHKVTLTTAIIQDATNQIKNTTPTYLTQNPQLGISFSNLSETTSQPITILASTTPSAESTPQSTTVKTKNTTTTQIQPSKSTTKQRQNKPQNKPNNDFHFEVFNFVPCSICSNNPTCWAICKRIPNKKPGKKTTTKPTKKPTIKTTKKDLKPQTTKSKEVLTTKPTEKPTINTTKTNIRTTLLISNTTGNPEHTSQKETLHSTTSEGNPSPSQVYTTSEYLSQSLSPSNTTYY

SEQ ID NO: 391 - protein, 574 aa, Human respiratory syncytial virus
  fusion glycoprotein of Human respiratory syncytial virus
MELPILKANAITTILAAVTLCFVSSQNITEEFYQSTCSAVSKGYLSALRTGWYTSVITIELSNIKENKCNGTDAKVKLIKQELDKYKNAVTELQLLMQSTPAANNRARRELPRFMNYTLNNTKNTNVTLSKKRKRRFLGFLLGVGSAIASGIAVSKVLHLEGEVNKIKSALLSTNKAVVSLSNGVSVLTSKVLDLKNYIDKQLLPIVNKQSCSISNIETVIEFQQKNNRLLEITREFSVNAGVTTPVSTYMLTNSELLSLINDMPITNDQKKLMSNNVQIVRQQSYSIMSIIKEEVLAYVVQLPLYGVIDTPCWKLHTSPLCTTNTKEGSNICLTRTDRGWYCDNAGSVSFFPQAETCKVQSNRVFCDTMNSLTLPSEVNLCNVDIFNPKYDCKIMTSKTDVSSSVITSLGAIVSCYGKTKCTASNKNRGIIKTFSNGCDYVSNKGVDTVSVGNTLYYVNKQEGKNLYVKGEPIINFYDPLVFPSDEFDASISQVNEKINQSLAFIRKSDELLHNVNAGKSTTNIMITTIIIVIIVILLSLIAVGLLLYCKARSTPVTLSKDQLSGINNIAFSS

SEQ ID NO: 392 - protein, 64 aa, Human respiratory syncytial virus
  small hydrophobic protein of Human respiratory syncytial virus
MENTSITIEFSSKFWPYFTLIHMITTIISLLIIISIMIAILNKLCEYNAFHNKTFELPRARINT

SEQ ID NO: 393 - protein, 2165 aa, Human respiratory syncytial virus (strain A2)
  RNA polymerase beta subunit (Large structural protein) (L  protein) of Human respiratory syncytial vi rus
MDPIINGNSANVYLTDSYLKGVISFSECNALGSYIFNGPYLKNDYTNLISRQNPLIEHMNLKKLNITQSLISKYHKGEIKLEEPTYFQSLLMTYKSMTSSEQIATTNLLKKIIRRAIEISDVKVYAILNKLGLKEKDKIKSNNGQDEDNSVITTIIKDDILSAVKDNQSHLKADKNHSTKQKDTIKTTLLKKLMCSMQHPPSWLIHWFNLYTKLNNILTQYRSNEVKNHGFTLIDNQTLSGFQFILNQYGCIVYHKELKRITVTTYNQFLTWKDISLSRLNVCLITWISNCLNTLNKSLGLRCGFNNVILTQLFLYGDCILKLFHNEGFYIIKEVEGFIMSLILNITEEDQFRKRFYNSMLNNITDAANKAQKNLLSRVCHTLLDKTVSDNIINGRWIILLSKFLKLIKLAGDNNLNNLSELYFLFRIFGHPMVDERQAMDAVKINCNETKFYLLSSLSMLRGAFIYRIIKGFVNNYNRWPTLRNAIVLPLRWLTYYKLNTYPSLLELTERDLIVLSGLRFYREFRLPKKVDLEMIINDKAISPPKNLIWTSFPRNYMPSHIQNYIEHEKLKFSESDKSRRVLEYYLRDNKFNECDLYNCVVNQSYLNNPNHVVSLTGKERELSVGRMFAMQPGMFRQVQILAEKMIAENILQFFPESLTRYGDLELQKILELKAGISNKSNRYNDNYNNYISKCSIITDLSKFNQAFRYETSCICSDVLDELHGVQSLFSWLHLTIPHVTIICTYRHAPPYIGDHIVDLNNVDEQSGLYRYHMGGIEGWCQKLWTIEAISLLDLISLKGKFSITALINGDNQSIDISKPIRLMEGQTHAQADYLLALNSLKLLYKEYAGIGHKLKGTETYISRDMQFMSKTIQHNGVYYPASIKKVLRVGPWINTILDDFKVSLESIGSLTQELEYRGESLLCSLIFRNVWLYNQIALQLKNHALCNNKLYLDILKVLKHLKTFFNLDNIDTALTLYMNLPMLFGGGDPNLLYRSFYRRTPDFLTEAIVHSVFILSYYTNHDLKDKLQDLSDDRLNKFLTCIITFDKNPNAEFVTLMRDPQALGSERQAKITSEINRLAVTEVLSTAPNKIFSKSAQHYTTTEIDLNDIMQNIEPTYPHGLRVVYESLPFYKAEKIVNLISGTKSITNILEKTSAIDLTDIDRATEMMRKNITLLIRILPLDCNRDKREILSMENLSITELSKYVRERSWSLSNIVGVTSPSIMYTMDIKYTTSTISSGIIIEKYNVNSLTRGERGPTKPWVGSSTQEKKTMPVYNRQVLTKKQRDQIDLLAKLDWVYASIDNKDEFMEELSIGTLGLTYEKAKKLFPQYLSVNYLHRLTVSSRPCEFPASIPAYRTTNYHFDTSPINRILTEKYGDEDIDIVFQNCISFGLSLMSVVEQFTNVCPNRIILIPKLNEIHLMKPPIFTGDVDIHKLKQVIQKQHMFLPDKISLTQYVELFLSNKTLKSGSHVNSNLILAHKISDYFHNTYILSTNLAGHWILIIQLMKDSKGIFEKDWGEGYITDHMFINLKVFFNAYKTYLLCFHKGYGKAKLECDMNTSDLLCVLELIDSSYWKSMSKVFLEQKVIKYILSQDASLHRVKGCHSFKLWFLKRLNVAEFTVCPWVVNIDYHPTHMKAILTYIDLVRMGLINIDRIHIKNKHKFNDEFYTSNLFYINYNFSDNTHLLTKHIRIANSELENNYNKLYHPTPETLENILANPIKSNDKKTLNDYCIGKNVDSIMLPLLSNKKLIKSSAMIRTNYSKQDLYNLFPMVVIDRIIDHSGNTAKSNQLYTTTSHQISLVHNSTSLYCMLPWHHINRFNFVFSSTGCKISIEYILKDLKIKDPNCIAFIGEGAGNLLLRTVVELHPDIRYIYRSLKDCNDHSLPIEFLRLYNGHINIDYGENLTIPATDATNNIHWSYLHIKFAEPISLFVCDAELSVTVNWSKIIIEWSKHVRKCKYCSSVNKCMLIVKYHAQDDIDFKLDNITILKTYVCLGSKLKGSEVYLVLTIGPANIFPVFNVVQNAKLILSRTKNFIMPKKADKESIDANIKSLIPFLCYPITKKGINTALSKLKSVVSGDILSYSIAGRNEVFSNKLINHKHMNILKWFNHVLNFRSTELNYNHLYMVESTYPYLSELLNSLTTNELKKLIKITGSLLYNFHNE

SEQ ID NO: 394 - protein, 241 aa, Human respiratory syncytial virus
  phosphoprotein P of Human respiratory syncytial virus
MEKFAPEFHGEDANNRATKFLESIKGKFTSPKDPKKKDSIISVNSIDIEVTKESPITSNSTIMNPTNETDDTVGNKPNYQRKPLVSFKEDPMLSDNPFSKLYKETIETFDNNEEESSYSYEEINDQTNDNITARLDRIDEKLSEILGMLHTLVVASAGPTSARDGIRDAMVGLREEMIEKIRTEALMTNNRLEAMARLRNEESEKMAKDTSDEVSLNPTSEKLNNLLEGNDSDDDLSLEDF

SEQ ID NO: 395 - protein, 83 aa, Human respiratory syncytial virus
  attachment glycoprotein G of Human respiratory syncytial virus
KRDPKTPAKMLNKETTTNPTKNLTLKTTERDTSTSQSTVLDTSTSKHIILQQSLHSTTPENTPNFTQTPTASEPSTSNSTQKT

SEQ ID NO: 396 - protein, 391 aa, human respiratory syncytial virus  (strain 18537)
  nucleocapsid protein of Human respiratory syncytial virus
MALSKVKLNDTLNKDQLLSSSKYTIQRSTGDNIDTPNYDVQKHLNKLCGMLLITEDANHKFTGLIGMLYAMSRLGREDTIKILKDAGYHVKANGVDITTYRQDINGKEMKFEVLTLSSLTSEIQVNIEIESRKSYKKLLKEMGEVAPEYRHDSPDCGMIILCIAALVITKLAAGDRSGLTAVIRRANNVLKNEIKRYKGLIPKDIANSFYEVFEKHPHLIDVFVHFGIAQSSTRGGSRVEGIFAGLFMNAYGSGQVMLRWGVLAKSVKNIMLGHASVQAEMEQVVEVYEYAQKLGGEAGFYHILNNPKASLLSLTQFPNFSSVVLGNAAGLGIMGEYRGTPRNQDLYDAAKAYAEQLKENGVINYSVLDLTAEELEAIKHQLNPKEDDVEL

SEQ ID NO: 397 - protein, 391 aa, Human respiratory syncytial virus
  nucleoprotein (N)  of Human respiratory syncytial virus
MALSKVKLNDTLNKDQLLSSSKYTIQRSTGDSIDTPNYDVQKHINKLCGMLLITEDANHKFTGLIGMLYAMSRLGREDTIKILRDAGYHVKANGVDVTTHRQDINGKEMKFEVLTLSSLTTEIQINIEIESRKSYKKMLKEMGEVAPEYRHDSPDCGMIILCIAALVITKLAAGDRSGLTAVIRRANNVLKNEMKRYKGLLPKDIANSFYEVFEKYPHFIDVFVHFGIAQSSTRGGSRVEGIFAGLFMNAYGAGQVMLRWGVLAKSVKNIMLGHASVQAEMEQVVEVYEYAQKLGGEAGFYHILNNPKASLLSLTQFPHFSSVVLGNAAGLGIMGEYRGTPRNQDLYDAAKAYAEQLKENGVINYSVLDLTAEELEAIKHQLNPKDNDVEL

SEQ ID NO: 398 - protein, 256 aa, Human respiratory syncytial virus
  matrix protein of Human respiratory syncytial virus
METYVNKLHEGSTYTAAVQYNVLEKDDDPASLTIWVPMFQSSMPADLLIKELANVNILVKQISTPKGPSLRVMINSRSAVLAQMPSKFTICANVSLDERSKLAYDVTTPCEIKACSLTCLKSKNMLTTVKDLTMKTLNPTHDIIALCEFENIVTSKKVIIPTYLRSISVRNKDLNTLENITTTEFKNAITNAKIIPYSGLLLVITVTDNKGAFKYIKPQSQFIVDLGAYLEKESIYYVTTNWKHTATRFAIKPMED

SEQ ID NO: 399 - DNA, 1185 bp, Human metapneumovirus; identical to SEQ ID NO: 370
  CDS (1)...(1185): Nucleoprotein (N)

SEQ ID NO: 400 - DNA, 885 bp, Human metapneumovirus; identical to SEQ ID NO: 378
  CDS (1)...(885): Phosphoprotein (P)

SEQ ID NO: 401 - DNA, 765 bp, Human metapneumovirus; identical to SEQ ID NO: 362
  CDS (1)...(765): Matrix Protein (M)

SEQ ID NO: 402 - DNA, 564 bp, Human metapneumovirus; identical to SEQ ID NO: 342
  CDS (1)...(564): Matrix Protein 2-1 (M2)

SEQ ID NO: 403 - DNA, 216 bp, Human metapneumovirus; identical to SEQ ID NO: 350
  CDS (1)...(216): Matrix Protein 2-2 (M2)

SEQ ID NO: 404 - DNA, 552 bp, Human metapneumovirus; identical to SEQ ID NO: 386
  CDS (1)...(552): Small Hydrophobic Protein (SH)

SEQ ID NO: 405 - protein, 2005 aa, Human metapneumovirus; identical to SEQ ID NO: 330
  RNA-dependent RNA polymerase (L) of Human metapneumovirus

SEQ ID NO: 406 - DNA, 13350 bp, Human metapneumovirus; identical to SEQ ID NO: 19
  RNA-dependent RNA polymerase (L) of Human metapneumovirus

SEQ ID NO: 407 - protein, 568 aa, Human parainfluenza 1 virus (strain CI-5/73)
  RNA polymerase alpha subunit (Nucleocapsid phosphoprotein) of  Human parainfluenza 1 virus
MDQDAFFSERDPEAEGETPRKQESLSDVIGLLDVVLSYKPTEIGEDRSWLHSIIDNSKENKPSCKADDNNKDRAISTPTQDHRSSEESGISRRTGESKTETHARILDQQGIHRASRRGTSPNPLPENMGNERNTRIDEDSPNERRHQRSVPTDEDRKMAENSNKREEDQVEGFPEEVRRGTPLSDDREGRTNNNGRSMETSSTHSTRITDVITNPSPELEDAVLQRNKRRPTTIKRSQTRSERTQNSELHKSTSEDSSNLEDHNTKTSPKVLPSKNEESVATQKNNHNHRKTKYTTNNANNNTKSLPTPEHDTTANEEGTSNTSVDEMAKLLVSLGVIKSQHEFELSRSASHVFAKRMLKSANYKEMTFNLCGMLLSVEKSLENKVEENRTLLKQIQEEIDSSRDLHKRFSEYQKEQNSLMMANLSTLHIITDRGGKTGDPSDTTRSPSVFTKGKDNKVKKTRFDPSMEALGGQEFKPDLIREDELRDDIRNPVLEEHNNEPQASNASRLIPSTEKHTLHSLKLVIENSPLSRVEKKAYIKSLYKCRTNQEVKNVMELFEEDIDSLTN

SEQ ID NO: 408 - protein, 2223 aa, Human parainfluenza virus 1 strain Washington/1964
  L polymerase protein of Human parainfluenza 1 virus
MDKQESTQNSSDILYPECHLNSPIVKSKIAQLHVLLDINQPYDLKDNSIINITKYKIRNGGLSPRQIKIRSLGKILKQEIKDIDRYTFEPYPIFSLELLRLDIPEICDKIRSIFSVSDRLIRELSSGFQELWLNILRQLGCVEGKEGFDSLKDVDIIPDITDKYNKNTWYRPFLTWFSIKYDMRWMQKNKSGNHLDVSNSHNFLDCKSYILIIYRDLVIIINKLKLTGYVLTPELVLMYCDVVEGRWNMSSAGRLDKRSSKITCKGEELWELIDSLFPNLGEDVYNIISLLEPLSLALIQLDDPVTNLKGAFMRHVLTELHTILIKDNIYTDSEADSIMESLIKIFRETSIDEKAEIFSFFRTFGHPSLEAITAADKVRTHMYSSKKIILKTLYECHAIFCAIIINGYRERHGGQWPPCEFPNHVCLELKNAQGSNSAISYECAVDNYSSFIGFKFLKFIEPQLDEDLTIYMKDKALSPRKAAWDSVYPDSNLYYKVPESEETRRLIEVFINDNNFNPADIINYVESGEWLNDDSFNISYSLKEKEIKQEGRLFAKMTYKMRAVQVLAETLLAKGVGELFSENGMVKGEIDLLKRLTTLSVSGVPRSNSVYNNPILHEKLIKNMNKCNSNGYWDERKKSKNEFKAADSSTEGYETLSCFLTTDLKKYCLNWRFESTALFGQRCNEIFGFKTFFNWMHPILEKSTIYVGDPYCPVPDRMHKELQDHDDTGIFIHNPRGGIEGYCQKLWTLISISAIHLAAVKVGVRVSAMVQGDNQAIAVTSRVPVTQTYKQKKTHVYEEITRYFGALREVMFDIGHELKLNETIISSKMFVYSKRIYYDGKILPQCLKALTRCVFWSETLVDENRSACSNIATSIAKAIENGYSPILGYCIALFKTCQQVCISLGMTINPTITSTIKDQYFKGKNWLRCAILIPANIGGFNYMSTARCFVRNIGDPAVAALADLKRFIKAGLLDKQVLYRVMNQEPGDSSFLDWASDPYSCNLPHSQSITTIIKNVTARSVLQESPNPLLSGLFSESSSEEDLNLASFLMDRKAILPRVAHEILDNSLTGVREAIAGMLDTTKSLVRASVRRGGLSYSILRRLINYDLLQYETLTRTLRKPVKDNIEYEYMCSVELAIGLRQKMWFHLTYGRPIHGLETPDPLELLRGSFIEGSEICKFCRSEGNNPMYTWFYLPDNIDLDTLSNGSPAIRIPYFGSATDERSEAQLGYVKNLSKPAKAAIRIAMVYTWAYGTDEISWMEAALIAQTRANLSLENLKLLTPVSTSTNLSHRLRDTATQMKFSSATLVRASRFITISNDNMALKEAGESKDTNLVYQQIMLTGLSLFEFNMRYKQGSLSKPMILHLHLNNKCCIIESPQELNIPPRSTLDLEITQENNKLIYDPDPLKDIDLELFSKVRDVVHTIDMNYWSDDEIIRATSICTAMTIADTMSQLDRDNLKEMIALINDDDINSLITEFMVIDIPLFCSTFGGILINQFAYSLYGLNVRGRDEIWGYVIRIIKDTSHAVLKVLSNALSHPKIFKRFWDAGVVEPVYGPNLSNQDKILLAISVCEYSVDLFMRDWQEGIPLEIFICDNDPNIAEMRKLSFLARHLAYLCSLAEIAKEGPKLESMTSLERLESLKEYLELTFLDDPILRYSQLTGLVIKIFPSTLTYIRKSSIKVLRVRGIGIPEVLEDWDPDADSMLLDNITAEVQHNIPLKKNERTPFWGLRVSKSQVLRLRGYEEIKREERGRSGVGLTLPFDGRYLSHQLRLFGINSTSCLKALELTYLLNPLVNKDKDRLYLGEGAGAMLSCYDATLGPCMNYYNSGVNSCDLNGQRELNIYPSEVALVGKKLNNVTSLCQRVKVLFNGNPGSTWIGNDECETLIWNELQNNSIGFIHCDMEGGEHKCDQVVLHEHYSVIRIAYLVGDKDVILVSKIAPRLGTDWTKQLSLYLRYWRDVSLIVLKTSNPASTEMYLISKDPKSDIIEDSNTVLANLLPLSKEDSIKIEKWILVEKAKVHDWIVRELKEGSASSGMLRPYHQALQIFGFEPNLNKLCRDFLSTLNIVDTKNCIITFDRVLRDTIFEWTRIKDADKKLRLTGKYDLYPLRDSGKLKVISRRLVISWIALSMSTRLVTGSFPDIKFESRLQLGIVSISSREIKNLRVISKIVIDKFEDIIHSVTYRFLTKEIKILMKILGAVKLFGARQSTSADITNIDTSDSIQ

SEQ ID NO: 409 - protein, 575 aa, Human parainfluenza virus 1 strain Washington/1964
  HN glycoprotein of Human parainfluenza 1 virus
MAEKGKTNSSYWSTTRNDNSTVNTHINTPAGRTHIWLLIATTMHTVLSFIIMILCIDLIIKQDTCMKTNIMTVSSMNESAKIIKETITELIRQEVISRTINIQSSVQSGIPILLNKQSRDLTQLIEKSCNRQELAQICENTIAIHHADGISPLDPHDFWRCPVGEPLLSNNPNISLLPGPSLLSGSTTISGCVRLPSLSIGDAIYAYSSNLITQGCADIGKSYQVLQLGYISLNSDMYPDLNPVISHTYDINDNRKSCSVIAAGTRGYQLCSLPTVNETTDYSSEGIEDLVFDILDLKGKTKSHRYKNEDITFDHPFSAMYPSVGSGIKIENTLIFLGYGGLTTPLQGDTKCVINRCTNVNQSVCNDALKITWLKKRQVVNVLIRINNYLSDRPKIVVETIPITQNYLGAEGRLLKLGKKIYIYTRSSGWHSNLQIGSLDINNPMTIKWAPHEVLSRPGNQDCNWYNRCPRECISGVYTDAYPLSPDAVNVATTTLYANTSRVNPTIMYSNTSEIINMLRLKNVQLEAAYTTTSCITHFGKGYCFHIVEINQASLNTLQPMLFKTSIPKICKITS

SEQ ID NO: 410 - protein, 348 aa, Human parainfluenza virus 1 strain Washington/1964
  matrix protein of Human parainfluenza 1 virus
MAETYRFPRFSHEENGTVEPLPLKTGPDKKAIPHIRIVKVGDPPKHGVRYLDVLLLGFFETPKQGPLSGSISDLTESTSYSICGSGSLPIGIAKYYGTDQELLKACIDLKITVRRTVRSGEMIVYMVDSIHAPLLPWSSRLRQGMIYNANKVALAPQCLPVDKDIRFRVVFVNGTSLGTITIAKVPKTLADLALPNSISVNLLVTLRAGVSTEQKGILPVLDDDGEKKLNFMVHLGIIRRKVGKIYSVEYCKNKIEKMKLIFSLGLVGGISFHVHATGTLSKTLMSQLAWKKAVCYPLMDVNPHMNLVIWAASVEITSVDAVFQPAIPKEFRYYPNVVAKSIGKIRRI

SEQ ID NO: 411 - protein, 181 aa, Human parainfluenza virus 1 strain Washington/1964
  Y1 protein of Human parainfluenza 1 virus
MSSDSLTSSYPTSPQKLEKTEAGSMVSSTTQKKTSHHAKPTITTKTEQSQRRPKIIDQVRGVESLGEQVSQKQRHMLESLINKVYTGPLGEELVQTLYLRIWAMKETPESTKILQMREDIRDQYLRMKTERWLRTLIRGKKTKLRDFQKRYEEVHPYLMMERVEQIIMEEAWKLAAHIVQE

SEQ ID NO: 412 - protein, 204 aa, Human parainfluenza virus 1 strain Washington/1964
  C protein of Human parainfluenza 1 virus
MPSFLRGILKPKERHHENKNHSQMSSDSLTSSYPTSPQKLEKTEAGSMVSSTTQKKTSHHAKPTITTKTEQSQRRPKIIDQVRGVESLGEQVSQKQRHMLESLINKVYTGPLGEELVQTLYLRIWAMKETPESTKILQMREDIRDQYLRMKTERWLRTLIRGKKTKLRDFQKRYEEVHPYLMMERVEQIIMEEAWKLAAHIVQE

SEQ ID NO: 413 - protein, 568 aa, Human parainfluenza virus 1 strain Washington/1964
  phosphoprotein of Human parainfluenza 1 virus
MDQDAFFFERDPEAEGEAPRKQESLSDVIGLLDVVLSYKPTEIGEDRSWLHGIIDNPKENKPSCKADDNNKDRAISTSTQDHRSSEGSGISRRTSESKTETHARILDQQGIHRASRRGTSPNPLPENMGNERNTRIDEDSPNERRHQRSVLTDEDRKMAENSNKREEDQVEGFPEEVRRSTPLSDDGEGRTNNNGRSMETSSTHSTRITDVITNPSPELEDAVLQRNKRRPTTIKRNQTRSERTQSSELHKSTSENSSNLEDHNTKTSPKVPPSKNEESAATPKNNHNHRKTRYTTNNANNNTKSPPTPEHDATANEEETSNTSVDEMAKLLVSLGVMKSQHEFELSRSASHVFAKRMLKSANYKEMTFNLCGMLISVEKSLENKVEENRTLLKQIQEEINSSRDLHKRFSEYQKEQNSLMMANLSTLHIITDRGGKTGNPSDTTRSPSVFTKGKDNKVKKTRFDPSMEALGGQEFKPDLIREDELRDDIKNPVLEENNNEPQASNASRLIPSTEKHTLHSLKLVIENSPLSRVEKKAYIKSLYKCRTNQEVKNVMELFEEDIDSLTN

SEQ ID NO: 414 - protein, 524 aa, Human parainfluenza virus 1 strain Washington/1964
  nucleoprotein of Human parainfluenza 1 virus
MAGLLSTFDTFSSRRSESINKSGGGAIIPGQRSTVSVFTLGPSVTDDADKLLIATTFLAHSLDTDKQHSQRGGFLVSLLAMAYSSPELYLTTNGVNADVKYVIYNIERDPKRTKTDGFIVKTRDMEYERTTEWLFGPMINKNPLFQGQRENADLEALLQTYGYPACLGAIIVQVWIVLVKAITSSAGLRKGFFNRLEAFRQDGTVKSALVFTGDTVEGIGAVMRSQQSLVSLMVETLVTMNTSRSDLTTLEKNIQIVGNYIRDAGLASFMNTIKYGVETKMAALTLSNLRPDINKLRSLVDIYLSKGARAPFICILRDPVHGDFAPGNYPALWSYAMGVAVVQNKAMQQYVTGRTYLDMEMFLLGQAVAKDADSKISSALEEELGVTDTAKERLRHHLTNLSGGDGAYHKPTGGGAIEVAIDHTDITFGVEDTADRDNKNWTNDSNERWMNHSISNHTITIRGAEELEEETNDEDITDIENKIARRLADRKQRLSQANNKRDTSSDADYENDDDATAAAGIGGI

SEQ ID NO: 415 - protein, 555 aa, Human parainfluenza virus 1 strain Washington/1964
  F glycoprotein of Human parainfluenza 1 virus
MQKSEILFLVYSSLLLSSSLCQIPVEKLSNVGVIINEGKLLKIAGSYESRYIVLSLVPSIDLQDGCGTTQIIQYKNLLNRLLIPLKDALDLQESLITITNDTTVTNDNPQTRFFGAVIGTIALGVATAAQITAGIALAEAREARKDIALIKDSIVKTHNSVELIQRGIGEQIIALKTLQDFVNDEIRPAIGELRCETTALKLGIKLTQHYSELATAFSSNLGTIGEKSLTLQALSSLYSANITEILSTTKKDKSDIYDIIYTEQVKGTVIDVDLEKYMVTLLVKIPILSEIPGVLIYRASSISYNIEGEEWHVAIPNYIINKASSLGGADVTNCIESKLAYICPRDPTQLIPDNQQKCILGDVSKCPVTKVINNLVPKFAFINGGVVANCIASTCTCGTNRIPVNQDRSRGVTFLTYTNCGLIGINGIELYANKRGRDTTWGNQIIKVGPAVSIRPVDISLNLASATNFLEESKTELMKARAIISAVGGWHNTESTQIIMIIIVCILIIIICGILYYLYRVRRLLVMINSTHNSPVNAYTLESRMRNPYMGNNSN

SEQ ID NO: 416 - protein, 373 aa, Human parainfluenza virus 3
  D protein of Human parainfluenza virus 3
MESDAKNYQIMDSWEEESRDKSTNISSALNIIEFILSTDPQEDLSENDTINTRTQQLSATIYQPKIKPTETSEKDSGSTDKNRQSGSSHECTTEAKDRTIDQETVQRGPGRRSSSDSRAETVVSGGISRSITNSKNGTQNTEDIDLNEIRKMDKDSIEGKVRQSADVPSEISGSDVIFTTEQSRNSDHGRSLESISTPDTRSISVVTAATPDDEEEILMKNSRTKKSSSIHQEDDKRIKKGGEKGKTGLRNQKILTTRYQHQTTDPHQKGRRKSQKQQPSTPTQRGKQKYRQNHQEHNPHHGISPLITTQIEPNRQTQLPQQQPPDQLIQKNQSEQTLDPNPRHKRQMERKGRIQKRAIDLQRGQLLYCRILV

SEQ ID NO: 417 - protein, 574 aa, Human parainfluenza virus 3
  hemagglutinin-neuraminidase of Human parainfluenza virus 3
MEYWKHTNHGKDAGNELETSMATHNNKLTNKIIYILWTIILVLLSIVFIIVLINSINSEKVHNSLLQEINNEFMEITEKIQMASDNTNDLIQSGVNTRLLTIQSHVQNYIPISLTQQMSDLRKFISEITIRNDNQEVPQQRITHDVGIKPLNPDDFWRCTSGLPFLMRNPKIRLMPGPGLLAMPTTVDGCVRTPSLIINDLIYAYTSNLITRGCQDIGKSYQVLQVGIITVNSDLVPDLNPRFSHTFNINDNRKSCSLALLNTDVYQLCSTPKVDERSDYASSGIEDIVLDIVNYDGSISTTRFKNNNISFDQPYAALYPSVGPGIYYKGKIIFLGYGGLEHPINENVICNTTECPGKTQRDCNQASYSPWFSDRRMVNSIIVVDKGLNSIPKLKVWTISMRQNYWGSEGRLILLGNKIYIYTRSTSWHSKLQLGIIDITDYSDIRIKWTWHNVLSRPGNDECPWGHSCPNGCITGVYTDAYPLNPTGSIVSSVILDSQKSRVNPVITYSTATERVNELAIRNRTLSAGYTTTSCITHYDKGYCFHIVEINQKSSNTFQPMLFKTEIPKSCSQS

SEQ ID NO: 418 - protein, 515 aa, Human parainfluenza virus 3
  nucleocapsid protein of Human parainfluenza virus 3
MLSLFDTFNARRQENITKSAGGAIIPGQKNTVSIFALGPTITDDNEKMTLALLFLSHSLDNEKQHAQRAGFLVSLLSMAYANPELYLTTNGSNADVKYVIYMIEKDLKRQKYGGFVVKTREMVYDKTTDWIFGSDLDCDQETMLQNGRNNSTIEDLVHTFGYPSCLGALIIQIWIVLVKAITSISGLRKGFFTRLEAFRQDGTVQAGLVLSGDTVDQIGSIMRSQQSLVTLMVETLITMNTSRNDLTTIEKNIQIVGNYIRDAGLASFFNTIRYGIETRMAALTLSTLRPDINRLKALMELYLSKGPRAPFICILRDPIHGEFAPGNYPAIWSYAMGVAVVQNRAMQQYVTGRSYLDIDMFQLGQAVARDAEAQMSSTLEDELGVTHEAKESLKRHIRNINSSETSFHKPTGGSAIEMAIDEEPEQFEHRSDQERDGEPQSSIIQYAWAEGNRSDDRTEQDTESDNIKTEQQNIRDRLNKRLNEKKKQGSQPPTNPTNRTNQDEIDDLFNAFGSN

SEQ ID NO: 419 - protein, 395 aa, Human parainfluenza virus 2
  P protein of Human parainfluenza virus 2
MAEEPTYTTEQVDELIHAGLGTVDFFLSRPIDAQSSLGKGSIPPGVTAVLTSAAETKSKPVAAGPVKPRRKKVISNTTPYTIADNIPPEKLPINTPIPNPLLPLARPHGKMTDIDIVTGNITEGSYKGVELAKLGKQTLLTRFTSNEPVSSAGSAQDPNFKRGGELIEKEQEATIGENGVLHGSEIRSKSSSGVIPGVPQSRPQLASSPAHADPAPASAENVKEIIELLKGLDLRLQTVEGKVDKILATSATIINLKNEMTSLKASVATMEGMITTIKIMDPSTPTNVPVEEIRKSLHNVPVVIAGPTSGGFTAEQVILISMDELARPTLSSTKRITRKPESKKDLTGIKLTLMQLANDCISRPDTKTEFVTKIQAATTESQLNEIKRSIIRSAI

SEQ ID NO: 420 - protein, 539 aa, Human parainfluenza virus
  F protein of Human parainfluenza virus
MSWKVVIIFSLLITPQHGLKESYLEESCSTITEGYLSVLRTGWYTNVFTLEVGDVENLTCADGPSLIKTELDLTKSALRELRTVSADQLAREEQIENPRQSRFVLGAIALGVATAAAVTAGVAIAKTIRLESEVTAIKNALKKTNEAVSTLGNGVRVLATAVRELKDFVSKNLTRAINKNKCDIADLKMAVSFSQFNRRFLNVVRQFSDNAGITPAISLDLMTDAELARAVSNMPTSAGQIKLMLENRAMVRRKGFGFLIGVYGSSVIYMVQLPIFGVIDTPCWIVKAAPSCSGKKGNYACLLREDQGWYCQNAGSTVYYPNEKDCETRGDHVFCDTAAGINVAEQSKECNINISTTNYPCKVSTGRHPISMVALSPLGALVACYKGVSCSIGSNRVGIIKQLNKGCSYITNQDADTVTIDNTVYQLSKVEGEQHVIKGRPVSSSFDPVKFPEDQFNVALDQVFESIENSQALVDQSNRILSSAEKGNTGFIIVIILIAVLGSTMILVSVFIIIKKTKKPTGAPPELSGVTNNGFIPHN

SEQ ID NO: 421 - protein, 236 aa, Human parainfluenza virus; identical to SEQ ID NO: 119
  G protein of Human parainfluenza virus

SEQ ID NO: 422 - protein, 120 aa, Homo sapiens [sequence omitted]

SEQ ID NO: 423 - protein, 106 aa, Homo sapiens
DIQMTQSPSTLSASVGDRVTITCSASSRVGYMHWYQQKPGKAPKLLIYDTLLLDSGVPSRFSGSGSGTEFTLTISSLQPDDFATYYCFQGSGYPFTFGGGTKLEIK

SEQ ID NO: 424 - protein, 532 aa, Avian pneumovirus; identical to SEQ ID NO: 10
  Avian pneumovirus fusion protein gene

SEQ ID NO: 425 - protein, 537 aa, Avian pneumovirus; identical to SEQ ID NO: 11
  Avian pneumovirus isolate 1b fusion protein mRNA

SEQ ID NO: 426 - protein, 538 aa, Turkey rhinotracheitis virus; identical to SEQ ID NO: 12
  Turkey rhinotracheitis virus gene for fusion protein (F1 and F2 subunits), complete cds

SEQ ID NO: 427 - protein, 537 aa, Avian penumovirus; identical to SEQ ID NO: 13
  Avian pneumovirus fusion glycoprotein (F) gene, complete cds

SEQ ID NO: 428 - protein, 391 aa, Turkey rhinotracheitis virus; identical to SEQ ID NO: 16
  Turkey rhinotracheitis virus (strain CVL14/1) attachment protien (G) mRNA, complete cds

SEQ ID NO: 429 - protein, 414 aa, rhinotracheitis virus; identical to SEQ ID NO: 17
  Turkey rhinotracheitis virus (strain 6574) attachment protein (G)

SEQ ID NO: 430 - protein, 46 aa, human metapneumovirus
  Postulated HRA sequence of strain NL1/00
KTIRLESEVTAIKNALKKTNEAVSTLGNGVRVLATAVRELKDFVSK

SEQ ID NO: 431 - protein, 46 aa, human metapneumovirus
  Postulated HRA sequence of strain NL17/00
KTIRLESEVTAIKNALKTTNEAVSTLGNGVRVLATAVRELKDFVSK

SEQ ID NO: 432 - protein, 46 aa, human metapneumovirus
  Postulated HRA sequence of strain NL1/99
KTIRLESEVNAIKGALKQTNEAVSTLGNGVRVLATAVRELKEFVSK

SEQ ID NO: 433 - protein, 46 aa, human metapneumovirus
  Postulated HRA sequence of strain NL1/94
KTIRLESEVNAIKGALKTTNEAVSTLGNGVRVLATAVRELKEFVSK

SEQ ID NO: 434 - protein, 29 aa, human metapneumovirus
  Postulated HRB sequence of strain NL1/00
NVALDQVFESIENSQALVDQSNRILSSAE

SEQ ID NO: 435 - protein, 29 aa, human metapneumovirus
  Postulated HRB sequence of strain NL17/00
NVALDQVFENIENSQALVDQSNRILSSAE

SEQ ID NO: 436 - protein, 29 aa, human metapneumovirus
  Postulated HRB sequence of strain NL1/99
NVALDQVFESIENSQALVDQSNKILNSAE

SEQ ID NO: 437 - protein, 29 aa, human metapneumovirus
  Postulated HRB sequence of strain NL1/94
NVALDQVFESIENSQALVDQSNKILNSAE
